(19) United States
(12) Patent Application Publication
(10) Pub. No.: US 2017/0254818 A1
(43) Pub. Date: Sep. 7, 2017

(54) CNS-SPECIFIC BIOMARKERS FOR CNS DISEASES OR INJURIES

(71) Applicants: William E. HASKINS, San Antonio, TX (US); Thomas G. FORSTHUBER, San Antonio, TX (US)

(72) Inventors: William E. HASKINS, San Antonio, TX (US); Thomas G. FORSTHUBER, San Antonio, TX (US)

(73) Assignee: THE BOARD OF REGENTS OF THE UNIVERSITY OF TEXAS SY STEM, Austin, TX (US)

(21) Appl. No.: 15/506,325

(22) PCT Filed: Aug. 24, 2015
(86) PCT No.: PCT/US15/46598

§ 371 Date: Feb. 24, 2017

Related U.S. Application Data
(60) Provisional application No. 62/041,099, filed on Aug. 24, 2014.
(60) Provisional application No. 62/044,501, filed on Sep. 2, 2014.

(51) Int. Cl. G01N 33/68

(52) U.S. Cl. CPC G01N 33/6896; G01N 2800/285

(57) ABSTRACT

Methods and compositions for detecting and/or measuring biomarkers associated with compromised BBB.

[0001] This Application claims priority to U.S. Provisional Patent Applications 62/041,099 filed Aug. 24, 2014, and 62/044,501 filed Sep. 2, 2014, each of which are incorporated herein by reference in their entirety.

### STATEMENT REGARDING FEDERALLY FUNDED RESEARCH

[0002] This invention was supported by National Institute of Health grants G12MD007591, grants NS52177 and NS084201, NIH5U54RR022762-05. The government has certain rights in this invention.

### FIELD OF THE INVENTION

[0003] The present invention relates generally to the fields of neurology, immunology, and diagnostics. In particular, the present invention relates to the identification and detection of biomarkers in biological samples indicative of neuronal and central nervous system disease.

### BACKGROUND

[0004] Multiple sclerosis (MS) is a debilitating disease of the central nervous system (CNS) that affects approximately 2.5 million people globally (Mateen et al. Lancet Neurol 11: 484-485, 2012). MS patients experience episodes of inflammation and demyelination that are believed to be mediated by an autoimmune attack directed against CNS-specific proteins (CSPs) of the myelin sheath on axons, including: myelin basic protein, proteolipid protein, and myelin oligodendrocyte glycoprotein. The autoimmune attack promotes an inflammatory cascade in the CNS highlighted by recruitment of innate- and adaptive-immune cells and release of inflammatory mediators that act in concert to damage the myelin sheath and neuronal axons.

[0005] Autoreactive T cells have been shown to be key mediators of this attack against the myelin sheath. Once activated, these T cells migrate and infiltrate into the CNS, crossing the blood-brain-barrier (BBB) in a multistep process (Steinman, Cell 85, 299-302, 1996; Goverman Nat Rev Immunol 9, 393-407, 2009). Infiltrating autoreactive T cells release inflammatory cytokines that modulate the activation of microglia, infiltrating macrophages, and dendritic cells to release neurotoxic mediators, including nitric oxide and reactive-oxygen species (ROS) (Rovaris et al. Lancet Neurol 5, 343-354, 2006; Dhib-Jalbut et al. Journal of neuroimmunology 176, 198-215, 2006). Macrophages, microglia, and dendritic cells are also actively involved in the inflammatory response (Hartung et al. J Neuroimmunol 40, 197-210, 1992; Benveniste, J Mol Med (Berl) 75, 165-173, 1997). While MS research has historically focused on inflammatory events in the CNS, such as the pathological role of cytokines (Veldhoen, Current opinion in immunology 21, 606-611, 2009; Olsson, Journal of neuroimmunology 40, 211-218, 1992), a more detailed molecular understanding of the biology of other proteins, particularly CSPs transported across the blood brain barrier (BBB) into cerebrospinal fluid (CSF) or serum, is critical to further the understanding of damage to the BBB and to develop new biomarkers and treatments based on this understanding.

[0006] There is a need for additional methods for assessing central nervous system integrity and diseases.

### SUMMARY OF THE INVENTION

[0007] Detection or profiling of central nervous system-specific proteins (CSPs) traversing a compromised or damaged blood-brain-barrier (BBB) to cerebrospinal fluid (CSF) and/or blood (e.g., serum) is a promising diagnostic, prognostic, and/or predictive method. Certain embodiments are directed to methods of identifying and/or detecting/quantitating CSP proteins or peptides in the CSF or serum. In certain aspects the protein biomarker(s) are not detected at appreciable levels in the circulation of healthy subjects. In further embodiments a microwave and magnetic (M2) proteomics assessment of CSPs in brain tissue is used to detect and/or prioritize CSP biomarkers in serum or for producing serum profiles. In certain aspects the biomarkers are detected using immunoassays. In a further aspect the biomarkers are measured over time to provide a biomarker signature.

[0008] In certain aspects a mouse model of multiple sclerosis is used as a representative model of BBB compromise. M2 proteomics is used to assess CSP expression in brain tissue or CSP presence in blood from mice during induction of experimental autoimmune encephalomyelitis (EAE). Confirmation of CNS-infiltrating inflammatory cell response and CSP presence or expression in serum is achieved with cytokine ELISPOT and ELISA immunoassays. M2 proteomics (and ELISA) revealed characteristic CSP expression waves, including synapsin-1 and α-II-spectrin, which peaked at day 7 in brain tissue (and serum) and preceded clinical EAE symptoms that began at day 10 and peaked at day 20. As used herein an expression wave is a change in expression (increase, decrease, or increase and decrease) of one or more proteins over a time period. Expression trajectory is used to refer to the rate of change (slope of the expression curve) of expression over time, e.g., expression that is increasing has a positive trajectory or slope whereas expression levels that are decreasing have a negative trajectory or slope. In certain aspects expression levels will be maintained giving rise to a flat trajectory or a slope of about 0. In certain aspects an expression wave of one or more biomarkers precedes a clinically detectable or definable event, and thus can be used as a predictive tool, e.g., it is a preclinical or pre-symptom indicator of a disease state. Various biomarkers may be detected in a number of expression waves that may be synchronized or out of phase with each other. In certain aspects one or more expression waves are correlated with a current or future condition or progression of the subject and can be used as a diagnostic, prognostic, or predictive tool. In one example an expression wave detected in an asymptomatic subject can diagnose a subject with a CNS disease or condition.

[0009] Embodiments are directed to methods and compositions for detecting one or more biomarkers or assessing a panel of biomarkers (profile) or generating a biomarker signature (expression profile over time—expression wave). As used herein a profile refers to the levels of a plurality of biomarkers at a particular time, whereas a biomarker signature or expression wave refers to a plurality of biomarker levels over a period of time, as indicated by obtaining and analyzing samples at multiple times. In certain aspects the period of time is sampled over 2, 3, 4, 5, 6, 7, 8, 9, 10 or more time points. In a further embodiment the time points are at least, about, or at most 1, 2, 3, 4, 5, 6, 7, 8, 9, 10, 11, 12, 20, 24, 30, 40, 50, or 60 hours or days apart. A biomarker signature or several biomarker levels at different time points can be used to characterize an expression wave of biomarkers. The biomarker signature can be assessed and used to classify a subject during treatment in order to characterize the progression, suppression, or regression of symptoms or a disease state in a patient over time. The biomarker signature can be used to assess the effectiveness of treatments and allow the modification of treatments or use of alternative treatments tailored to a particular patient having a particular biomarker profile or signature. Such assessment and modification of treatments can be used to yield a more favorable patient outcome. In certain aspects a biomarker profile is produced at various time points before, during, and/or after a treatment is administered. In certain aspects, blood samples are collected every 1, 2, 3, 4, 5, 6, 7, or more days, weeks, or months.

[0010] In certain embodiments a biological sample is contacted with a label or detection reagent that forms a conjugate or complex with a biomarker described herein. The complex is then detected by analyzing the labeled biomarker or detecting the biomarker/detection reagent complex. In certain aspects biological samples can be taken at two separate time points from the same subject or patient. In a further aspect the levels of the biomarker(s) are determined relative to a reference, control, or relative to time points at which samples are taken. In certain rate of change across a plurality of samples taken at different time points is determined.

[0011] In certain aspects the patient is suspected of having, diagnosed as having, or is at risk of having a compromised BBB or a condition or disease related to or resulting in a compromised BBB. A subject can be suspected of having a condition based on physiologic tests or symptomatic occurrences. A subject may be asymptomatic but at risk if the subject has a family history of a condition, a genetic biomarker indicating a probability of developing a condition, or the subject has been exposed to an environment, agent, or event that is known to cause or increase the occurrence of a condition. In a further aspect the patient is diagnosed with a neurodegenerative disease or a brain injury.

[0012] Certain embodiments are directed to prognostic or diagnostic methods for MS or similar conditions. In certain aspects the methods can be used to characterize or stage MS using the disclosed biomarkers and/or biomarker signatures. In a further aspect, one can adjust or modify the treatment of a patient based on the characterization or stage of disease. In certain aspects the modification or adjustment of a treatment includes modifying the dosage, intensity, length of treatment, frequency of treatment, and inclusion or elimination of any additional drug or combination of drug treatments, e.g., beta-interferons, therapeutic antibodies, Tysabri, glucocorticoids, natalizumab, fingolimod and/or glatiramer acetate.

[0013] In certain aspects the characterization of a subject or patient over time in conjunction with treatments can be used to identify treatments and therapies that ameliorate or prevent progressive episodes of neurodegenerative condition. In other aspects, toxic effects of treatments can be minimized by monitoring the biomarker profile or signature, and reducing or stopping treatments once a progression event has lessened or passed. In certain aspects a treatment is stopped once a biomarker signature indicates an end or a lessening of a progression event. In a further aspect a treatment is administered when a biomarker signature indicates the initiation or worsening of a progression event.

[0014] Certain embodiments are directed to methods for diagnosing a neurological disease in a subject associated with a compromised BBB. In certain aspects the method comprises determining an amount or detecting the presence of at least one peptide having an amino acid sequence of SEQ ID NO:1 to SEQ ID NO:544 in a biological sample from the subject. In certain aspect at least 2, 5, 10, 20, 40, 80, 160, 200, 300, 400, 500 or more peptides corresponding to SEQ ID NO:1 to 544 are measured in sample obtained at 1, 2, 3, 4, 5, 6, 7, 8, 9, 10 or more time points. In certain aspects the time point samples are obtained at least, about, or at most 1, 2, 3, 4, 5, 6, 7, 8, 9, 10, 11, 12, 13, 14, 15, 16, 17, 18, 19, 20, 21, 22, 23, 24, hours, days, or weeks apart. The amount, profile, or signature of one or more of the peptide(s) in the sample can be compared to a control level or a reference, wherein if the biomarker levels in the sample are different than the control level or reference, the subject can be diagnosed as having, or at an increased risk of developing, the neurological disease. In certain aspects aberration from a normal biomarker profile is indicative of degeneration of the BBB. Certain aspects are directed to a composition comprising a biological sample isolated from a subject and one or more antibodies that specifically and independently bind a peptide having an amino acid sequence of SEQ ID NO:1 to SEQ ID NO:544. In other aspects a peptide having an amino acid sequence of SEQ ID NO:1 to SEQ ID NO:544 can independently and separately form a complex with a detection reagent.

[0015] In certain aspects one or more peptide is selected from SEQ ID NO:465, SEQ ID NO:499, SEQ ID NO:265, SEQ ID NO:341, SEQ ID NO:384, SEQ ID NO:475, SEQ ID NO:503, SEQ ID NO:235, SEQ ID NO:383, SEQ ID NO:434, SEQ ID NO:544, and/or SEQ ID NO:163.

[0016] In a further aspect one or more peptide is selected from SEQ ID NO:39, SEQ ID NO:544, SEQ ID NO:163, SEQ ID NO:235, SEQ ID NO:265, SEQ ID NO:341, SEQ ID NO:375, SEQ ID NO:377, SEQ ID NO:378, SEQ ID NO:383, SEQ ID NO:384, SEQ ID NO:434, SEQ ID NO:475, SEQ ID NO:499, and/or SEQ ID NO:503.

[0017] In certain aspects the method comprises determining an amount or detecting the presence of at least one protein having an amino acid sequence of SEQ ID NO:545 to SEQ ID NO:923, or the human homolog thereof, in a biological sample from the subject. In certain aspects at least 2, 5, 10, 20, 40, 80, 160, 200, 300 or more proteins corresponding to one or more of SEQ ID NO:545 to 923, or human homolog, are measured in sample obtained at 1, 2, 3, 4, 5, 6, 7, 8, 9, 10 or more time points. The amount, profile, or signature of one or more of the peptide(s) in the sample can be compared to an earlier and/or later time point(s), a control level or a reference, wherein if the biomarker levels in the sample are different than the control level or reference, the subject can be diagnosed as having, or at an increased risk of developing, the neurological disease. In certain aspect aberration from a normal biomarker profile is indicative of degeneration of the BBB. Certain aspects are directed to a composition comprising a biological sample isolated from a subject and one or more antibodies that specifically and independently bind a protein having an amino acid sequence of SEQ ID NO:545 to SEQ ID NO:923, or the human homolog.

[0018] In certain embodiments, a biomarker can be 1, 2, 3, 4, 5, 6, 7, 8, 9, 10, 11, 12, 13, 14, 15, 16, 17, or more of α-II-spectrin, synapsin-1/2/3, myelin basic protein, ubiquitin carboxyl-terminal esterase L1, calcium/calmodulin-dependent protein kinase II alpha, neurofilament light and medium, parkin 2, peroxiredoxin-1/4/5/6, 14-3-3-β/ε/ζ, synaptotagmin, enolase-1/2, guanine nucleotide binding protein α and β1, superoxide dismutase 2, internexin neuronal intermediate filament protein α, tyrosine-protein phosphatase non-receptor type substrate 1, macrophage migration inhibitory factor, proteolipid protein 1, caspase 7, or combinations thereof.

[0019] In other embodiments one or more biomarkers can be selected from Neural cell adhesion molecule L1-like protein (CHL1), Neurofilament Medium (NF-M), Synaptotagmin 1 (SYT), Synapsin 3 (Syn 3), Spectrin alpha chain, brain (SPTAN1), Calcium/calmodulin-dependent protein kinase type II alpha chain (CAMK2A), Neurofilament Heavy (NF-H), Enolase 1 (ENO1), Synapsin 2 (Syn 2), Phosphatidylethanolamine binding protein 1 (PEBP1), Neurofilament Light (NF-L), Parkin (Park2), Enolase 2 (ENO2), Synapsin I (Syn 1), or combinations thereof.

[0020] Certain embodiments are directed to methods of evaluating a patient suspected of having a CNS disease comprising measuring the level of at least one protein and/or peptide found in a biological sample from a patient presenting with clinical symptoms consistent with a CNS disease or is suspected as having or being at risk of developing such disease, and diagnosing or evaluating the patient based on the levels of one or more biomarker in one or more biological sample. In certain aspects the one or more biological samples are taken over a period of days, weeks, or months. In certain aspects the presence or absence of one or more protein and/or peptide associated with a CNS disease or an exacerbation of a CNS disease indicates the diagnosis or the likelihood of developing a particular disease or classifies the severity or stage of a disease.

[0021] In certain aspects the biomarkers are used to produce a biomarker signature comprising a plurality of biomarkers measured over time. In a further aspect the biomarkers are evaluated at 2, 3, 4, 5, or more time points. The time point being 1, 2, 3, 4, 5, 6, 7, or more days, weeks, or months apart. The biomarkers are indicative of disease, disease progression, or disease severity. Patients with biomarker levels indicative of such disease can be diagnosed with a CNS disease or characterized as to the severity of a CNS disease.

[0022] The methods may further comprise administering a neuroprotective treatment to the patient based on a biomarker profile or the level of one or more proteins or peptides, even if no clinical symptoms are evident. In a further aspect the biomarker(s) or biomarker profile is used to monitor the response to treatment and/or disease progression.

[0023] In some embodiments, the levels of a plurality of proteins and/or peptides in the patient's sample can be used to prepare a biomarker profile or signature associated with CNS disease. The levels of proteins and/or peptides in the profile may be determined relative to levels of the proteins and/or peptides in control samples or normal samples or pre-determined reference values or ranges of reference values. The biomarker profile is, in some embodiments, indicative of the presence, stage, or severity of CNS disease in a patient. When such biomarker profiles or signatures are prepared from samples obtained from patients following administration of a neuroprotective treatment, the biomarker profile or signature, or changes in biomarker profile or signature can be used as an indicator of therapeutic efficacy of the neuroprotective treatment in the patient. These biomarker profiles can be used to monitor the progression or regression of a patient being treated. In some embodiments the neuroprotective treatment will be an experimental treatment, a glucocorticoid treatment, a beta-interferon treatment, a therapeutic antibody treatment, a Tysabri treatment, a natalizumab treatment, a fingolimod treatment, a glatiramer acetate treatment, or any combination thereof.

[0024] Certain embodiments are directed to methods for determining treatment efficacy and/or progression of a neurological disease in a subject. In some embodiments, the method comprises determining an amount of at least 1, 2, 3, 4, 5, 6, 7, 8, 9, 10, 11, 12, 13, 14, 15, 16, 17, 18, 19, 20 or more biomarkers described herein, in a first biological sample collected from the subject at a first time point; determining an amount of the selected biomarkers in a second biological sample from the subject at a second time point; and comparing the amounts of the selected biomarkers in the first and second samples, wherein a change in the amounts of the biomarkers from the first and second samples is indicative of treatment efficacy and/or progress of the neurological disease in the subject. In certain aspects, the first time point is prior to initiation of a treatment for the neurological disease and the second time point is after initiation of the treatment. In other embodiments, the first time point is prior to onset of the neurological disease and the second time point is after onset of the neurological disease. Determining an amount of a biomarker can comprise contacting the sample with a detection reagent that forms a complex with a biomarker and then detecting the complex. In certain aspects the detection reagent is an antibody or a label. In certain aspects the complex is detected by ELISA or mass spectrometry.

[0025] In certain aspects the subject or patient is human. In a further aspect the subject is at risk of developing, suspected of having, or has a condition associated with a compromised BBB. In certain aspect the subject is a multiple sclerosis patient. In a further aspect, the multiple sclerosis patient has relapsing remitting multiple sclerosis, a progressive multiple sclerosis, or both.

[0026] The present invention also provides a method of determining a prognosis for a patient with a central nervous system disease. In one embodiment, the method comprises detecting and/or quantitating in a biological sample one or more biomarkers in the biological sample and generating a biomarker profile or signature, wherein the biomarker profile or signature is indicative of the prognosis of the patient. In certain aspects the biological sample is cerebrospinal fluid or blood, or a component thereof, e.g., serum, plasma, etc. In particular embodiments, an elevated level of at least one protein and/or peptide relative to a pre-determined reference value or range of reference values is indicative of disease progression. For, example elevated synapsin-1, or fragments thereof, levels are predictive of the patient having a relapse of their disease.

[0027] In certain aspects a biological sample is obtain from a patient who recently (within the preceding 1, 2, 3, 4, or more days, weeks, or months) experienced an initial clinical attack. In certain aspects the sample is obtained prior to administration of treatment. In a further aspect samples are taken at various time points after the initial clinical attack to monitor treatment efficacy and disease course. Samples can be obtained periodically whether clinical symptoms persist or not. In certain aspects a sample is obtained about every 1, 2, 3, 4, 5, months or so. In certain aspects the biomarker profile or signature is correlated with (a) disease remission and therapeutic efficacy including proper dosing of therapies, (b) success or failure of therapy, (c) disease stage, e.g., is a patient progressing, (d) expression waves that are indicative of relapse, etc.

[0028] Upon producing the biomarker signature or measuring levels of a protein and/or peptide selected from the biomarker listed herein a physician would then determine: whether the disease is in remission and the drugs are working, whether the drugs are failing or have failed, whether the patient is progressing, and/or whether a patient is at risk of relapse.

[0029] Certain embodiments include kits for use in generating biomarker profiles or signatures, or measuring one or more biomarkers associated with a disease. In one embodiment, the kit comprises a probe, such as labeled-antibody or fragment thereof, that labels or specifically binds to biomarker described herein, including the peptides or proteins in SEQ ID NO:1-923. In certain aspects the biomarker is selected from human or mouse α-II-spectrin, synapsin-1/2/3, myelin basic protein, ubiquitin carboxyl-terminal esterase L1, calcium/calmodulin-dependent protein kinase II alpha, neurofilament light and medium, parkin 2, peroxiredoxin-1/4/5/6, 14-3-3-β/ε/ζ, synaptotagmin, enolase-1/2, guanine nucleotide binding protein α and β1, superoxide dismutase 2, internexin neuronal intermediate filament protein α, tyrosine-protein phosphatase non-receptor type substrate 1, macrophage migration inhibitory factor, proteolipid protein 1, and/or caspase 7.

[0030] In certain embodiments, a biomarker can be measured and/or detected by mass spectrometry (MS) analysis (e.g., matrix-assisted laser desorption/ionization (MALDI) time-of-flight (TOF) MS analysis, Microwave and Magnetic (M2), or electrospray ionization ((ESI) MS), immunoassay analysis (e.g., enzyme-linked immunosorbent assay (ELISA)), multiplexed bead assays or combinations thereof.

[0031] In certain embodiments a sample can be fractionated or modified before detecting or measuring biomarkers. In certain aspects abundant proteins are removed from the sample prior to detecting or measuring a target biomarker. For example albumin and/or immunoglobulin are removed from the sample prior to detection or measurement.

[0032] A biological sample includes all or a portion of a saliva sample, a blood sample, a serum sample, a plasma sample, a urine sample, or a cerebrospinal fluid (CSF) sample. In certain aspect the biological sample is a blood or CSF sample.

[0033] In certain aspects a patient can be monitored using a biomarker panel described herein and provided a treatment regime personalized for that patient based on the biomarker signature or biomarker profile of that patient.

[0034] In certain embodiments treatments are monitored and optimized by: detecting a biomarker signature in biological samples from an individual comprising determining expression levels for 2, 3, 4, 5, 6, 7, 8, 9, 10, 11, 12, 13, 14, 15, 16, 17, 18, 19, 20 or more biomarkers described herein; and determining or identifying a treatment regimen and/or treatment initiation point based on the biomarker signature. In certain aspects treatment initiation is based on the clinical responsiveness to therapies correlated with particular biomarker signatures, e.g., symptoms that follow a particular expression wave.

[0035] In other aspects, a likelihood of the onset, or clinical progression of symptoms in an individual can be determined by measuring or detecting one or more biomarker over time (biomarker signature), and comparing the biomarker signature with a reference or standard biomarker signature associated with clinical symptoms, the potential for manifestation of clinical symptoms, and/or treatment conditions, and determining or identifying an individual that has or is at risk of having a disease (e.g., multiple sclerosis) and/or characterizing the stage of the disease. In certain aspects the biomarker signature will indicate an increased level or an increasing level of biomarker relative to a reference or normal biomarker signatures. In certain aspect the reference or normal biomarker signature is that of a healthy individual(s), an individual without any clinical symptoms of a CNS disease, and/or patients with a CNS disease that have been characterized at a particular disease milestone or stage.

[0036] Certain aspects employ a step of correlating the presence or amount of biomarker described herein in a biological sample with the severity, stage, or presence of a CNS disease or condition. The amount or time course of one or more biomarker in the biological sample directly relates to severity, diagnosis, prognosis, or predictability of a CNS disease or condition which in turn causes a larger amount of biomarker(s) to accumulate in or change over time in the biological sample (e.g., serum). The results of such a test can help a physician determine whether the administration, alteration, or cessation of a therapy might be of benefit to a patient.

[0037] A “biological sample” as used herein refers to a sample of biological tissue or biological fluid. Examples of biological samples are sections of tissues, blood, blood fractions, plasma, serum, urine, CSF, or samples from other sources. A biological sample may be provided by removing a sample of cells or a portion of fluid from a subject, but can also be provided by using a previously isolated sample. For example, a tissue sample can be removed from a subject suspected of having a disease by conventional biopsy techniques. In certain embodiments, a blood sample is taken from the subject. In one embodiment, the blood or tissue sample is obtained from the subject prior to initiation of and/or during treatment.

[0038] “Polypeptide”, “protein”, or “peptide” refers to polymer of amino acids joined by peptide bonds or modified peptide bonds. “Polypeptide” refers to longer chains, including proteins, whereas peptide refers to shorter chains of 100 amino acids or less.

[0039] “Antibody” refers to all isotypes of immunoglobulins (IgG, IgA, IgE, IgM, IgD, and IgY) including various monomeric and polymeric forms of each isotype, unless otherwise specified. “Functional fragments” of such antibodies comprise portions of intact antibodies that retain antigen-binding specificity of the parent antibody molecule.

[0040] Moieties of the invention, such as polypeptides, peptides, antigens, or immunogens, may be conjugated or linked covalently or noncovalently to other moieties such as adjuvants, proteins, peptides, supports, fluorescence moieties, or labels. The term “conjugate” or “immunoconjugate” is broadly used to define the operative association of one moiety with another agent and is not intended to refer solely to any type of operative association, and is particularly not limited to chemical “conjugation.”

[0041] The antibodies or functional fragments thereof can be labeled or otherwise conjugated to various chemical or biomolecule moieties, for example, for diagnostic or detection applications. The moieties can be detectable labels, for example, fluorescent labels, radiolabels, biotin, and the like, which are known in the art. There are a wide variety of fluorophore labels that can be attached to the antibodies and probes. Common useful fluorophores can be fluorescein isothiocyanate (FITC), allophycocyanin (APC), R-phycoerythrin (PE), peridinin chlorophyll protein (PerCP), Texas Red, Cy3, Cy5, fluorescence resonance energy tandem fluorophores such as PerCPCy5.5, PE-Cy5, PE-Cy5.5, PE-Cy7, PE-Texas Red, and APC-Cy7. Other fluorophores include, inter alia, Alexa Fluor® 350, Alexa Fluor® 488, Alexa 25 Fluor® 532, Alexa Fluor® 546, Alexa Fluor® 568, Alexa Fluor® 594, Alexa Fluor® 647 (monoclonal antibody labeling kits available from Molecular Probes, Inc., Eugene, Oreg., USA), BODIPY dyes, such as BODIPY 493/503, BODIPY FL, BODIPY R6G, BODIPY 530/550, BODIPY TMR, BODIPY 558/568, BODIPY 558/568, BODIPY 564/570, BODIPY 576/589, BODIPY 581/591, BODIPY TR, BODIPY 630/650, BODIPY 650/665, Cascade Blue, Cascade Yellow, Dansyl, lissamine rhodamine B, Marina Blue, Oregon Green 488, Oregon Green 514, Pacific Blue, rhodamine 6G, rhodamine green, rhodamine red, tetramethylrhodamine, Texas Red (available from Molecular Probes, Inc., Eugene, Oreg., USA), and Cy2, Cy3, Cy3.5, Cy5, Cy5.5, Cy7, all of which are also useful for fluorescently labeling antibodies or other biomarker probes. For secondary detection using labeled avidin, streptavidin, captavidin or neutravidin, the antibodies can be labeled with biotin. When antibodies are used, e.g., for western blotting applications, they can usefully be labeled with radioisotopes, such as ³³P, ³²P, ³⁵S, ³H, and ¹²⁵I.

[0042] The terms “treating” or “treatment” refer to any attempt to attenuate or ameliorate an injury, pathology or condition, including any objective or subjective parameter such as abatement, remission, diminishing of symptoms, pathology, or making a condition more tolerable to the patient, slowing in the rate of degeneration or decline, making the final point of degeneration less debilitating, improving a subject's physical or mental well-being, or prolonging the length of survival. The treatment or amelioration of symptoms can be based on objective or subjective parameters; including the results of a physical examination, neurological examination, and/or psychiatric evaluations.

[0043] As used herein, the term “subject” refers to any mammal, including both human and other mammals. Preferably, the methods of the present invention are applied to human subjects.

[0044] “Prognosis” refers to a prediction of how a patient will progress, and whether there is a chance of recovery. A good or bad prognosis may, for example, be assessed in terms of patient survival, likelihood of disease recurrence, or disease progression (which is assessed in relation to a defined time point).

[0045] In one embodiment, the biomarker level is compared to a reference level representing the same biomarker in a non-disease context. In certain aspects, the reference level may be a reference level of expression from non-diseased sample(s) from a subject(s) not diagnosed with the disease in question. Alternatively, reference level may be a reference level of expression from a group of subjects. The reference level may be a single value or may be a range of values. The reference level of expression can be determined using any method known to those of ordinary skill in the art. In some embodiments, the reference level is an average level of expression determined from a cohort of subjects. The reference level may also be depicted graphically as an area on a graph. The reference level may comprise data obtained at the same time (e.g., in the same hybridization experiment) as the patient's individual data, or may be a stored value or set of values e.g. stored on a computer, or on computer-readable media. If the latter is used, new patient data for the selected marker(s), obtained from initial or follow-up samples, can be compared to the stored data for the same marker(s) without the need for additional control experiments.

[0046] The phrase “specifically binds” or “specifically immunoreactive” to a target refers to a binding reaction that is determinative of the presence of the molecule in the presence of a heterogeneous population of other biologics. Thus, under designated conditions, a specified molecule or probe (e.g., antibody) binds preferentially to a particular target and does not bind in a significant amount to other biologics present in the sample. A variety of immunoassay formats may be used to select antibodies specifically immunoreactive with a particular protein. For example, solid-phase ELISA immunoassays are routinely used to select monoclonal antibodies specifically immunoreactive with a protein. See, e.g., Harlow and Lane, Antibodies: A Laboratory Manual, Cold Spring Harbor Press, 1988, for a description of immunoassay formats and conditions that can be used to determine specific immunoreactivity.

[0047] The use of the word “a” or “an” when used in conjunction with the term “comprising” in the claims and/or the specification may mean “one,” but it is also consistent with the meaning of “one or more,” “at least one,” and “one or more than one.”

[0048] Throughout this application, the term “about” is used to indicate that a value includes the standard deviation of error for the device or method being employed to determine the value.

[0049] The use of the term “or” in the claims is used to mean “and/or” unless explicitly indicated to refer to alternatives only or the alternatives are mutually exclusive, although the disclosure supports a definition that refers to only alternatives and “and/or.”

[0050] As used in this specification and claim(s), the words “comprising” (and any form of comprising, such as “comprise” and “comprises”), “having” (and any form of having, such as “have” and “has”), “including” (and any form of including, such as “includes” and “include”) or “containing” (and any form of containing, such as “contains” and “contain”) are inclusive or open-ended and do not exclude additional, unrecited elements or method steps.

[0051] Other objects, features and advantages of the present invention will become apparent from the following detailed description. It should be understood, however, that the detailed description and the specific examples, while indicating specific embodiments of the invention, are given by way of illustration only, since various changes and modifications within the spirit and scope of the invention will become apparent to those skilled in the art from this detailed description.

### BRIEF DESCRIPTION OF THE DRAWINGS

[0052] The following descriptions form part of the present specification and are included to further demonstrate certain aspects of the present invention. The invention may be better understood by reference to one or more of these drawings in combination with the detailed description of the specification embodiments presented herein.

[0053] FIG. 1. Disease trajectory for the entire cohort studied herein (top), where mice were evaluated daily for EAE clinical symptoms. The disease distribution and disease trajectory for the mice for M² proteomics are also shown (bottom and inset, respectively). Mice for M² proteomics were randomly selected and sacrificed from 8 disease time points (18≦n≦20 specimens per time point), described by the number of days (d) post-immunization [−1 d (non-immunized), 0 d (3hrs post-immunization), 5 d, 7 d, 10 d, 15 d, 20 d and 25 d]. These time points were selected to reflect inflection points of pre-onset, disease onset, early disease, disease peak and remission.

[0054] FIG. 2. M² proteomics trajectories for selected differentially expressed peptides from synapsin-1 (A2AE14_MOUSE). Values for (1) significant differential expression (AUC>0.9) between two post-immunization time points and (2) significant differential expression (overall p-value<1.0E-03) across all post-immunization time points are provided in Supplementary Information.

[0055] FIG. 3. Synapsin-1 (A2AE14_MOUSE) yielded (A) 5 peptides with significant differential expression (pair-wise time point contrasts) between 5 vs. 7 days and (B) 5 peptides with significant differential expression between 0 vs. 7 days post-immunization.

[0056] FIG. 4. ELISA results for levels of two CSPs: (A) synapsin-1 in brain tissue, (B) α-II-spectrin in brain tissue, and (C) synapsin-1 (gray) and α-II-spectrin (black) in serum.

[0057] FIG. 5. ELISPOT results for levels of two pro-inflammatory cytokines: (A) IFN-γ in spleen tissue, (B) IL-17 in spleen tissue, (C) IFN-γ in brain tissue, and (D) IL-17 in brain tissue.

[0058] FIG. 6. Hierarchical clustering of risk groups by correlating relative peptide expression to post-immunization time for a subset of CSPs and other putative protein biomarkers measured by M² proteomics. (A) shows non-supervised clustering for all CSPs, while (B) shows representative supervised hierarchical clustering results for synapsin-1 (A2AE14_MOUSE).

[0059] FIG. 7. Time-specific analysis of the CNS-proteome during EAE reveals expression −waves.

[0060] FIG. 8. Proteomics analyses of CNS in the pre-onset phase reveals a list of potential biomarkers to predict disease onset.

[0061] FIG. 9. Prioritization of biomarkers by bioinformatics and expression trajectories.

[0062] FIG. 10. Serum levels of biomarkers predict onset and correlate with CNS proteome changes.

[0063] FIG. 11. Serum levels of biomarkers predict onset and correlated with CNS proteome changes.

[0064] FIG. 12. Serum levels of biomarkers predict onset and correlated with CNS proteome changes.

### DETAILED DESCRIPTION OF THE INVENTION

[0065] Multiple sclerosis (MS) can be used as one example of a disease state that involves the compromise of the blood brain barrier (BBB). Clinical diagnosis of MS, versus other similar neurological diseases, and classification into the consensus definitions of the four major subtypes of MS is based on a limited diagnostic repertoire, including: clinical appearance, disease history and laboratory imaging and/or diagnostics (Steinman, Cell 85, 299-302, 1996; Sospedra and Martin, Annu Rev Immunol 23, 683-747, 2005; Noseworthy et al., N Engl J Med 343, 938-952, 2000; Thompson et al., Brain: a journal of neurology 120 (6), 1085-1096, 1997; Lublin and Reingold, Neurology 46, 907-911, 1996; Confavreux et al., The New England journal of medicine 343, 1430-1438, 2000). Currently, MS is classified into relapsing-remitting (RRMS), secondary-progressive (SPMS), primarily-progressive (PPMS) and progressive-relapsing (PRMS). Approximately 80% of the patients initially develop the RRMS form of the disease, characterized by clinical attacks (relapses) with diverse neurological dysfunctions, followed by functional recovery (remission). More than half of these patients will eventually develop SPMS, characterized by progressive residual neurological deficiencies with or without attacks during the progressive phase (Lublin and Reingold, Neurology 46, 907-911, 1996). Current immunomodulatory treatments ameliorate, but do not cure, MS, including: beta-interferons, therapeutic antibodies, glucocorticoids, and glatiramer acetate. Responses to treatments are highly variable between patients and no accurate means exist to predict efficacy of a particular drug. Individual responses to treatment are typically evaluated by clinical measures of disease progression such as the expanded disability status scale (EDSS) (Poonawalla et al., Mult Scler 16, 1117-1125, 2010) and magnetic resonance imaging (MRI) of brain lesion volume (Bakshi et al., Lancet Neurol 7, 615-625, 2008; Tourdias and Dousset, Neurotherapeutics, 2012; Filippi and Agosta, J Magn Reson Imaging 31, 770-788, 2010; Neema et al., Neurotherapeutics 4, 602-617, 2007). However, these clinical measures lack sensitivity and specificity for a large population of MS patients, and they fail to show a strong correlation between specific treatments and their efficacy in slowing disease progression in individual MS patients.

[0066] Thus, there is a need for molecular biochemical markers (biomarkers) with improved diagnostic, prognostic, and predictive power. However, poorly understood variations of genetic, environmental, and socioeconomic factors in the MS patient population present profound challenges for biomarker research. A diagnostic matrix with a particular combination of biomarkers might enable more precise molecular stratification of individual patients into treatment groups. Moreover, a particular combination of biomarkers might be necessary because not all of these molecules are expected to be exclusive to MS and might also be found in other diseases and neurological disorders.

[0067] Studying the relation of protein expression trajectories to disease progression within individual MS patients can mitigate population variability to a certain degree and account for potential patient-specific factors. More than 24,000 genes are translated and post-translationally modified into an estimated 2 million protein isoforms in humans, encoding far more molecular diversity than the relatively static genome or transcriptome. Paradoxically, less than 100 proteins are routinely quantified in serum today (Rifai et al., Nat Biotechnol 24, 971-983, 2006; Anderson and Anderson, Mol Cell Proteomics 1, 845-867, 2002). Thus, the most sensitive (most true-positive) and specific (least false-positive) biomarkers are expected to be at the protein level. Notably, proteins must be measured directly due to the poor correlation between the transcriptome and proteome due to alternative splicing, post-translational modifications, single nucleotide polymorphisms, limiting ribosomes available for translation, mRNA, protein stability and other factors (e.g., microRNA).

[0068] CNS specific proteins (CSPs), transported across the damaged BBB to cerebral spinal fluid (CSF) and/or blood are promising diagnostic, prognostic, and predictive (therapeutic) protein biomarkers of disease in individual MS patients because they are not expected to be present at appreciable levels in the circulation of healthy subjects. Compared to the highly variable clinical spectrum of individual MS patients, disease in groups of mice with experimental autoimmune encephalomyelitis (EAE), the major animal model for MS, is less heterogeneous and more synchronous, providing a strong rationale for preclinical biomarker studies.

### I. BIOMARKERS

[0069] A biomarker is an organic biomolecule, such as a protein or fragment thereof, that is differentially present in a sample taken from a subject of one phenotypic status (e.g., having a disease) as compared with another phenotypic status (e.g., not having the disease). A biomarker is differentially present between different phenotypic statuses if the mean or median expression level of the biomarker in the different groups is calculated to be statistically significant. Common tests for statistical significance include, among others, t-test, ANOVA, Kruskal-Wallis, Wilcoxon, Mann-Whitney and odds ratio. Biomarkers, alone or in combination, provide measures of relative risk that a subject belongs to one phenotypic status or another. As such, they are useful as markers for disease (diagnostics), therapeutic effectiveness of a drug (theranostics) and of drug toxicity.

[0070] Aspects described herein seek to develop methods for identifying, monitoring, and classifying patients at risk of having a compromised BBB based expression profiling. However, identification of predictive biomarkers in complex biofluids, such as plasma, have been challenging for proteomics technologies. Plasma is a complex biofluid, with its constituent proteins present in a broad dynamic concentration range spanning 6 log orders of magnitude or more (Anderson and Anderson Mol Cell Proteomics 1:845-67, 2002; Rifai and Gerszten, Clinical Chemistry 52:1635-37, 2006). Moreover, high-abundance proteins tend to adsorb lower-abundance proteins and peptides (Gundry et al. Proteomics Clin. Appl. 1:73-88, 2007; Seferovic et al., J Chrom. B Analyt. Technol. Biomed. Life Sci. 865:147-152, 2008). The presence of proteases may produce peptide fragments (Villanueva et al., J Proteome Res. 4:1060-72, 2005; Villanueva et al., Mol. Cell Proteomics 7:509-18, 2008), and the individual variation in plasma protein abundances serve to compound the difficulties in comprehensive proteomic analyses of plasma. With the advancement of multidimensional profiling techniques, the systematic and quick identification of predictive proteins associated with a disease is now feasible.

[0071] The spectrin-family is comprised of a group of membrane-bound proteins, including α-II-spectrin, that are present in most vertebrate tissues and were initially discovered as a component of erythrocyte membrane. Spectrin is composed of two subunits, α and β, that coil around each other to form a heterodimer. The α subunit is encoded by two different genes, while the β subunit is encoded by five different genes: alternative splicing generates additional isoforms. In the CNS, almost all major cell types express spectrin, with distinct isoforms found in different cell types. α-II-spectrin is predominantly localized to axons and to presynaptic terminals of neurons with an essential role in Ca+ mediated exocytosis and neurotransmitter release through its association with synapsin proteins that are found in the neuronal vesicles. α-II-spectrin is also cleaved by calcium-dependent cysteine proteases such as calpains and caspases during necrosis and apoptosis to generate breakdown products that are often protease-specific.

[0072] Synapsin-1, one of the CSPs reported in this application, is a phosphorylated CSP found at synaptic vesicles in neurons that can bind to several cytoskeleton components including actin, microtubules and α-II-spectrin. It is involved in synaptogenesis and calcium-dependent neurotransmitter release from synaptic vesicles, particularly glutamate release.

[0073] Biomarkers described herein comprise peptides having amino acid sequences corresponding to SEQ ID NO: 1 to 543. In certain aspects the biomarker is selected from human or mouse α-II-spectrin, synapsin-1/2/3, myelin basic protein, ubiquitin carboxyl-terminal esterase L1, calcium/calmodulin-dependent protein kinase II alpha, neurofilament light and medium, parkin 2, peroxiredoxin-1/4/5/6, 14-3-3-β/ε/ζ, synaptotagmin, enolase-1/2, guanine nucleotide binding protein α and β1, superoxide dismutase 2, internexin neuronal intermediate filament protein α, tyrosine-protein phosphatase non-receptor type substrate 1, macrophage migration inhibitory factor, proteolipid protein 1, and/or caspase 7.

[0074] CSP expression waves that were consistently observed include CPSs corresponding to one or more of SEQ ID NO:1 to 544 representing peptides having an AUC of greater than 0.90, relative to two time points between −1, 0, 5, 7, 10, 15, 20, 25 days relative to immunization. In certain aspects the contrast between day −1 and 0, −1 and 5, −1 and 7, −1 and 10, −1 and 15, −1 and 20, −1 and 25, 0 and 5, 0 and 7, 0 and 10, 0 and 15, 0 and 20, 0 and 25; 5 and 7, 5 and 10, 5 and 15, 5 and 20, 5 and 25, 7 and 10, 7 and 15, 7 and 20, 7 and 25, 10 and 15, 10 and 20, 10 and 25, 15 and 20, 15 and 25, or 20 and 25 results in an AUC of about or at least 0.90, 0.91, 0.92, 0.93, 0.94, 0.95, 0.96, 0.97, 0.98, 0.99, or 1.00.

### II. ASSAYS

[0075] In certain aspects, the biomarkers of this invention can be identified, measured or detected using microwave and magnetic (M²) proteomics for quantitative liquid chromatography-tandem mass spectrometry (LC/MS/MS) and/or immunoassay.

[0076] Microwave and magnetic (M²) proteomics for quantitative liquid chromatography-tandem mass spectrometry (LC/MS/MS) can be used to assess relatively large numbers of CSPs and brain tissue specimens in murine EAE (Raphael et al., Electrophoresis 33, 3810-3819, 2012; Mahesula et al., Electrophoresis 33, 3820-3829, 2012). M² proteomics synergizes off-line microwave-assisted chemical modification of CSPs bound to magnetic C8 microparticles, multiplexed isobaric encoding, and automated sample preparation with 96-well plates. M² proteomics is also amino acid sequence- and post-translational modification-specific (Ottens et al., Mass spectrometry reviews 25, 380-408, 2006; Ottens et al., Analytical chemistry 77, 4836-4845, 2005; Haskins et al., Journal of neurotrauma 22, 629-644, 2005; Wang et al. International review of neurobiology 61, 215-240, 2004). Despite its advantages, LC/MS/MS-based proteomics of low abundance CSPs can be confounded by masking effects due to high abundance proteins, particularly in CSF and serum where protein abundance can span up to 12 orders of magnitude (Kushnir et al., Clinical chemistry 59, 982-990, 2013; Lehmann et al., Clinical chemistry and laboratory medicine: CCLM/FESCC 51, 919-935, 2013).

[0077] Microwave and Magnetic (M2) Sample Preparation. Isobaric labeling is a mass spectrometry strategy used in quantitative proteomics. Peptides or proteins are labeled with various chemical groups that are (at least nominally) isobaric, or the same in mass, but which fragment during tandem mass spectrometry to yield reporter ions of different mass. In a typical bottom-up proteomics workflow, proteins are enzymatically digested by a protease to produce peptides, which are then labeled with different isobaric tags. The samples are mixed in equal ratios. During a liquid chromatography-mass spectrometry analysis, the peptides are fragmented to produce sequence-specific product ions, which help to determine the peptide sequence, as well as the reporter tags, whose abundances reflect the relative ratio of the peptide in the samples that were combined. In certain aspects C8 magnetic beads (BcMg, Bioclone Inc.) are suspended and washed with an equilibration buffer (e.g., 200 mM NaCl, 0.1% trifluoroacetic acid (TFA)). Whole cell protein lysate (25-100 μg at 1 μg/μL) is mixed with pre-equilibrated beads and ⅓^{rd} sample binding buffer (e.g., 800 mM NaCl, 0.4% TFA) by volume. The mixture is incubated at room temperature and the supernatant removed. The beads are washed (e.g., with 40 mM triethylammonium bicarbonate (TEAB)), and then 10 mM dithiolthreitol (DTT) is added. The bead-lysate mixture is heated by microwave for 10 s. DTT is removed and iodoacetamide (IAA) is added, followed by a second microwave heating for 10 s. The beads are washed twice and re-suspended in TEAB. In vitro proteolysis is performed with trypsin and microwave heated for 20 s in triplicate. The supernatant is used immediately or stored at −80° C. Released tryptic peptides from digested protein lysates, including any reference material, are modified at the N-terminus and at lysine residues with the tandem mass tagging (TMT)-6plex isobaric labeling reagents (Thermo scientific, San Jose, Calif.) or other similar reagent. Each individual specimen is encoded with one of the TMT-127-130 reagents, while reference material is encoded with the TMT-126 and -131 reagents: anhydrous acetonitrile is added to TMT labeling reagent and microwave-heated for 10s. To quench the reaction, 5% hydroxylamine is added to the sample at room temperature. To normalize across all specimens, TMT-encoded cell lysates from individual specimens, labeled with the TMT-127-130 reagents, are mixed with the reference material encoded with the TMT-126 and -131 reagents in equal ratios. These sample mixtures, including all TMT-encoded specimens, were stored at −80° C. until further use.

[0078] Capillary Liquid Chromatography-Fourier-Transform-Tandem Mass Spectrometry (LC/FT/MS/MS) with Protein Database Searching. Capillary LC/FT/MS/MS can be performed. For unbiased analyses, the top 6 most abundant eluting ions were fragmented by data-dependent HCD with a mass resolution of 120,000 for MS and 15,000 for MS/MS. For isobaric TMT labeling, probability-based protein database searching of MS/MS spectra against the Trembl protein database (release 2012_dec29; 59,862 sequences) was performed with a 10-node MASCOT cluster (v. 2.3.02, Matrix Science, London, UK) with the following search criteria: peak picking with Mascot Distiller; 10 ppm precursor ion mass tolerance, 0.8 Da product ion mass tolerance, 3 missed cleavages, trypsin, carbamidomethyl cysteines as a static modification, oxidized methionines, and deamidated asparagines as variable modifications, an ion score threshold of 20 and TMT-6-plex for quantification.

[0079] Immunoassay requires biospecific capture reagents, such as antibodies, to capture the biomarkers. Antibodies can be produced by methods well known in the art, e.g., by immunizing animals with a biomarker and isolating antibodies that specifically bind the biomarker. Biomarkers can be isolated from samples based on their binding characteristics. Alternatively, if the amino acid sequence of a polypeptide biomarker is known, the polypeptide can be synthesized and used to generate antibodies.

[0080] This invention contemplates using traditional immunoassays including, for example, sandwich immunoassays including ELISA or fluorescence-based immunoassays, as well as other enzyme immunoassays. In the SELDI-based immunoassay, a biospecific capture reagent for the biomarker is attached to the surface of an MS probe, such as a pre-activated ProteinChip array. The biomarker is then specifically captured on the biochip through this reagent, and the captured biomarker is detected by mass spectrometry.

### III. KITS

[0081] In another aspect, the present invention provides kits for detecting and/or measuring biomarkers described herein. In one embodiment, the kit comprises a solid support, such as a chip, a microtiter plate, a bead, or resin having a capture reagent or probe attached thereon, wherein the capture reagent or probe binds a biomarker described herein. Thus, for example, the kits of the present invention can comprise mass spectrometry probes for SELDI, such as ProteinChip® arrays.

[0082] The kit can also comprise a washing solution or instructions for making a washing solution, in which the combination of the capture reagent and the washing solution allows capture of a biomarker or biomarkers on the solid support for subsequent detection by, e.g., mass spectrometry. The kit includes one or more of: (a) a substrate for holding a biological sample isolated from a human subject suspected of having or know to have a CNS-disease; (b) an agent that specifically binds at least one biomarker selected from the peptides and/or proteins described herein; and (c) printed instructions for reacting the agent with the biological sample or a portion of the biological sample to detect the presence or amount of the at least one marker in the biological sample. In the kit, the biological sample can be CSF or blood, and the agent can be an antibody, aptamer, or other molecule that specifically binds at least one peptide and/or protein described herein. The kit can also include a detectable label such as one conjugated to the agent, or one conjugated to a substance that specifically binds to the agent (e.g., a secondary antibody).

[0083] In a further embodiment, such a kit can comprise instructions for suitable operational parameters in the form of a label or separate insert. For example, the instructions may inform a consumer about how to collect the sample, how to wash the probe or the particular biomarkers to be detected. In yet another embodiment, the kit can comprise one or more containers with capture reagents, and control or reference samples.

### IV. EXAMPLES

[0084] The following examples as well as the figures are included to demonstrate preferred embodiments of the invention. It should be appreciated by those of skill in the art that the techniques disclosed in the examples or figures represent techniques discovered by the inventors to function well in the practice of the invention, and thus can be considered to constitute preferred modes for its practice. However, those of skill in the art should, in light of the present disclosure, appreciate that many changes can be made in the specific embodiments which are disclosed and still obtain a like or similar result without departing from the spirit and scope of the invention.

### Example 1

### Microwave and Magnetic (M2) Proteomics for CNS-Specific Protein Biomarkers of Experimental Autoimmune Encephalomyelitis and Multiple Sclerosis

[0085] A. Material and Methods

[0086] Murine Experimental Autoimmune Encephalomyelitis (EAE). Five week-old C57BL/6 female mice were purchased from the Jackson Laboratory (Stock number 000664; Bar Harbor, Me.) and used at 6-8 weeks of age in the studies. All animals were maintained in pathogen free conditions in the American Association for Laboratory Animal Science (AALAS) facility, under the guidelines established by the Institutional Animal Care and Use Committee (IACUC) at the University of Texas at San Antonio. Mice were allowed to rest for 8 days, and they were maintained under specific pathogen-free conditions. Active induction of EAE was performed with a subcutaneous injection of each mouse with 200 μg of myelin oligodendrocyte glycoprotein (MOG) 35-55 peptide (United Biochemical Research, Seattle, Wash.) in 50 μL of complete Freund's adjuvant (CFA) containing Mycobacterium tuberculosis H37Ra (Difco Laboratories, Detroit, Mich.) at a final concentration of 5 mg/mL. Two intra-peritoneal (i.p.) injections of Bordetella pertussis toxin (PTX; List Biological, Campbell, Calif.) at 200 ng per mouse were given at the time of immunization and 48 hours later (Cardali and Maugeri, Journal of neurosurgical sciences 50, 25-31, 2006). Animals were monitored and graded daily for clinical signs of EAE using the following scoring system (Hall et al., Journal of neurotrauma 22, 252-265, 2005): 0, no abnormality; 1, limp tail; 2, moderate and hind limb weakness; 3, complete hind limb paralysis; 4, quadriplegia or premoribund state; 5, death. Mice for M² proteomics were randomly selected and sacrificed at 8 disease time points, described by the number of days (d) post-immunization [−1 d (non-immunized), 0 d (3hrs post-immunization), 5 d, 7 d, 10 d, 15 d, 20 d and 25 d] (n˜20 per time point). These time points were selected to reflect inflection points of pre-onset, disease onset, early disease, disease peak, and remission (for example See FIG. 7). These time points are a practical compromise between the minimum number of mice and the minimum number of samples required to define the overall trajectory of disease progression. Brain tissue was snap-frozen in liquid nitrogen and stored at −80° C. until further use by cytokine immunoassays and M² proteomics.

[0087] Cytokine Immunoassays. Antigen-induced T cell responses were assessed in dissociated brain and spleen tissue by enzyme-linked immunosorbent spot (ELISPOT) assay for interferon-γ and interleukin-17A (IFN-γ and IL-17) as previously described (Beer et al., Journal of neurochemistry 75, 1264-1273, 2000) after stimulation with MOG35-55 peptide (United Biochemical Research, Seattle, Wash.). Briefly, ELISPOT plates (Multiscreen IP; Millipore) were coated with anti-IFN-γ (AN-18; 1 μg/mL) or anti-IL-17A (17F3; 2 μg/mL) capture antibodies in phosphate buffered saline (PBS). The plates were blocked with 1% bovine serum albumin (BSA) in PBS for 1 h at room temperature and then washed four times with PBS. After 1 hour of blocking with PBS/1% BSA, cells were added with or without antigen and incubated for 24 h at 37° C. The plates were washed three times with PBS and four times with PBS/Tween 20, and biotinylated anti-IFN-γ (R4-6A2; 0.5 μg/ml) or -IL-17A (eBioTC11-8H4; 0.125 μg/ml) detection antibodies were added and incubated overnight, respectively. Plates were washed four times with PBS/Tween 20 and incubated with streptavidin-alkaline phosphatase (Invitrogen). Cytokine spots were visualized with a BCIP/NBT phosphatase substrate (Kirkegaard & Perry Laboratories, Gaithersburg, Md.). Image analysis of ELISPOT assays was performed a Series 6 Universal-V Immunospot analyzer and Immunospot 5.1 software (Cellular Technology Limited) as described previously (Weiss et al., The Annals of thoracic surgery 88, 543-550, 2009; Jaros et al., Methods in molecular biology 1002, 1-11, 2013). Results for antigen-specific T cells were normalized with a negative control containing peptide-free media. All measurements were performed in duplicate.

[0088] Brain Tissue Lysate. Whole cell protein was extracted from brain tissue using the RIPA Lysis Buffer Kit (Santa Cruz Biotechnology, Inc. Santa Cruz, Calif.) according to the manufacturer's protocol. Briefly, an appropriate amount of RIPA complete lysis buffer was added to cell pellet. The mixture was incubated on ice for 5 minutes, followed by centrifugation at 14000×g for 15 min at 4° C. The supernatant was collected as brain tissue lysate and stored at −80° C. until further use. Protein concentration was determined using Invitrogen EZQ Protein Quantitation Kit (Invitrogen, Grand Island, N.Y.). Protein from all mice (n=157), spanning all time points, was pooled as reference material.

[0089] Microwave and Magnetic (M2) Sample Preparation. For isobaric TMT labeling, protein was pooled from all specimens by protein amount as reference material prior to sample preparation from individual specimens. Approximately 50 mg of C8 magnetic beads (BcMg, Bioclone Inc.) were suspended in 1 mL of 50% methanol. Immediately before use, 100 μL of the beads were washed 3 times with equilibration buffer (200 mM NaCl, 0.1% trifluoroacetic acid (TFA)). Whole cell protein lysate (25-100 μg at 1 μg/μL) was mixed with pre-equilibrated beads and ⅓^{rd} sample binding buffer (800 mM NaCl, 0.4% TFA) by volume. The mixture was incubated at room temperature for 5 min followed by removing the supernatant. The beads were washed twice with 150 μL of 40 mM triethylammonium bicarbonate (TEAB), and then 150 μL of 10 mM dithiolthreitol (DTT) was added. The bead-lysate mixture underwent microwave heating for 10 s. DTT was removed and 150 μL of 50 mM iodoacetamide (IAA) added, followed by a second microwave heating for 10 s. The beads were washed twice and re-suspended in 150 μL of 40 mM TEAB. In vitro proteolysis was performed with 4 μL of trypsin in a 1:25 trypsin-to-protein ratio (stock=1 μg/μL in 50mM acetic acid) and microwave heated for 20 s in triplicate. The supernatant was used immediately or stored at −80° C. Released tryptic peptides from digested protein lysates, including the reference materials described above, were modified at the N-terminus and at lysine residues with the tandem mass tagging (TMT)-6plex isobaric labeling reagents (Thermo scientific, San Jose, Calif.). Each individual specimen was encoded with one of the TMT-127-130 reagents, while reference material was encoded with the TMT-126 and -131 reagents: 41 μL of anhydrous acetonitrile was added to 0.8 mg of TMT labeling reagent for 25 μg of protein lysate and microwave-heated for 10 s. To quench the reaction, 8 μL of 5% hydroxylamine was added to the sample at room temperature. To normalize across all specimens, TMT-encoded cell lysates from individual specimens, labeled with the TMT-127-130 reagents, were mixed with the reference material encoded with the TMT-126 and -131 reagents in 1₁₂₆:1₁₂₇:1₁₂₈:1₁₂₉:1₁₃₀:1₁₃₁ ratios. These sample mixtures, including all TMT-encoded specimens, were stored at −80° C. until further use.

[0090] Capillary Liquid Chromatography-Fourier-Transform-Tandem Mass Spectrometry (LC/FT/MS/MS) with Protein Database Searching. Capillary LC/FT/MS/MS was performed with a splitless nano LC-2D pump (Eksigent, Livermore, Calif.), a 50 μm-i.d. column packed with 7 cm of 3 μm-o.d. C18 particles, and a hybrid linear ion trap-Fourier-transform tandem mass spectrometer (LTQ-ELITE; ThermoFisher, San Jose, Calif.) operated with a lock mass for calibration. The reverse-phase gradient was 2 to 62% of 0.1% formic acid (FA) in acetonitrile over 60 min at 350 nL/min. For unbiased analyses, the top 6 most abundant eluting ions were fragmented by data-dependent HCD with a mass resolution of 120,000 for MS and 15,000 for MS/MS. For isobaric TMT labeling, probability-based protein database searching of MS/MS spectra against the Trembl protein database (release 2012_dec29; 59,862 sequences) was performed with a 10-node MASCOT cluster (v. 2.3.02, Matrix Science, London, UK) with the following search criteria:peak picking with Mascot Distiller; 10 ppm precursor ion mass tolerance, 0.8 Da product ion mass tolerance, 3 missed cleavages, trypsin, carbamidomethyl cysteines as a static modification, oxidized methionines and deamidated asparagines as variable modifications, an ion score threshold of 20 and TMT-6-plex for quantification.

[0091] ELISA Immunoassays. Commercial ELISA Kits for α-II-spectrin (SEA292Mu) and synapsin-1 (SEC883Mu) were used per the manufacturer's suggested protocol (USCN Life Science Inc), where 500 μg of protein pooled from each time point (n˜20 per group) was added to the corresponding well in each plate. Plates were read at OD 450 nm for absorbance on a Synergy HT microplate reader (BioTek). For serum specimens, serum was collected from mice with mild EAE disease (disease score=1; day 10) or severe disease (score=3-4; day 20) and 1,500 μg of pooled serum samples were analyzed in triplicate with 4-5 mice per pool.

[0092] Prioritization of CSPs and Other Protein Biomarkers. CSPs and other protein biomarkers for MS patients were selected from our dataset by excluding proteins with the following descriptive terms for the protein name found in the Trembl protein database: heat shock, tubulin, histone, albumin, globin, lysosomal, mitochondrial, actin, dehydrogenase, myosin, transferrin, fructokinase, fructose, citrate, cytochrome c, glutathione, microtubule, ATP, clathrin, centromere, NADH, centrosomal, non-neuronal, elongation factor, peroxisomal, annexin, hexokinase, pyruvate, ribosomal, nucleoside, cofilin, titin, transcriptional inhibitory, initiation factor, glutamine, dynamin, RNA, cytoskeleton-associated, transducin, growth factor, vacuolar, tumor-related, phosphorylase, ribonucleoprotein, peptidyl-prolyl cis-trans isomerase, CoA, excision repair, phosphatase, zinc finger, triosephosphate isomerase, adenylyl, and keratin.

[0093] Statistical Analysis. The M2 proteomics results for each technical replicate estimate peptide expression for individual mice, encoded in sample mixtures, relative to pooled reference material from all mice, spanning all time points. Relative peptide expression levels were transformed to log base 2 for quantile normalization. Outlier arrays were removed based upon the following quality control procedures: (1) overall intensity histograms of normalized expression were compared with kernel smoothed density plots, and (2) hierarchical clustering of sample profiles was performed to assess the consistency of technical and biological variation. The association between relative peptide expression and EAE score was tested using a linear mixed-effect while treating EAE score as a continuous predictor. First, the EAE effect on relative peptide expression singly was treated as a univariate predictor. Next, the effects of EAE score were considered by adjusting for time as a quadratic effect. Changes in relative peptide expression with post-immunization time were tested using a linear mixed-effect model in which time was a treated as a multilevel factor. All the pairwise differences in relative peptide expression between all disease time points were tested, including both non-immunized mice (day −1) and 3 hrs post-immunization (day 0), using an unpaired, unequal variance t-test on the replicate averages. The relationship between the overall peptide expression profile with time or EAE score were examined using a hierarchical clustering display based upon Euclidean distance and complete linkage. For clustering analyses of relative peptide expression profiles, the subset of peptides that were most variable were considered by selecting the peptides in the top quartile (top 25%) by their standard deviation ranking Finally, the area under the receiver operating characteristic curve (AUC) were investigated for top-scoring peptides (AUC>0.9) from CSPs and other protein biomarkers, prioritized from the dataset as described above (Koutroukides et al., Journal of separation science 34, 1621-1626, 2011), and compared these values with overall p-values. Proteins were selected only if at least one peptide met the following inclusion criteria: (1) significant differential expression (AUC>0.9) between two post-immunization time points and (2) significant differential expression (overall p-value<1.0E-03) across all post-immunization time points. All statistical analysis was performed with R v3.0.2 (R-Project, Vienna, Austria).

[0094] Pathway and Network Analysis. Pathway and network analysis was performed with Ingenuity Pathways Analysis (IPA, Ingenuity R Systems) according to the manufacturer's suggestions. Briefly, MASCOT results were imported to IPA as .csv files and IPA's core analysis was performed on each file. Differentially expressed proteins corresponding to genes in the IPA knowledgebase were mapped onto canonical signaling pathways and molecular networks per the manufacturer's recommendations. A vertical bar plot, showing the percentage of proteins quantified in each canonical signaling pathway, was visualized to investigate pathway and molecular network enrichment during disease progression, where p-values for enrichment were assigned by IPA.

[0095] B. Results

[0096] The EAE score distribution and disease trajectory for mice that were blindly scored for clinical symptoms, including those randomly selected for analysis with M2 proteomics, are shown in FIG. 1. Consistent with previous reports, only a few mice exhibited mild clinical symptoms (EAE score≦1) by day 7 (pre-onset), with increased EAE scores evident for disease onset at day 10 (EAE score≧1) and disease peak at day 20 (EAE score≧2), followed by decreased EAE scores for remission at day 25 (Shen et al., Nature 507, 366-370, 2014; Sriskantharajah et al., Journal of immunology 192, 3518-3529, 2014; Sosa et al., Journal of immunology 191, 5848-5857, 2013).

[0097] Next, expression changes in the CNS proteome were tested in order to prioritize CSPs of EAE. Focus was on analysis of the brain-tissue proteome because MS is a major target of the brain (Peterson et al., Annals of neurology 50, 389-400, 2001; Klaver et al., Prion 7, 66-75, 2013; Lassmann, Philosophical transactions of the Royal Society of London. Series B, Biological sciences 354, 1635-1640, 1999). Overall, decoding isobarically-labeled peptide expression for each specimen relative to pooled reference materials enabled statistical calculations for 1032 peptides from CSPs and other protein biomarkers (from a total of 6608 peptides and 4512 proteins) with significant differential expression between two post-immunization time points (pair-wise time point contrasts) and significant differential expression across all post-immunization time points (overall p-value). Specifically, top-scoring peptides were required to have pair-wise time point contrast with an area under the receiver operating characteristic curve (AUC) greater than 0.9 and an overall p-value of less than 1.0E-03, respectively.

[0098] M2 proteomics revealed characteristic CSP expression waves, including synapsin-1 and α-II-spectrin, which peaked at day 7 in brain tissue and preceded clinical EAE symptoms that began at day 10 and peaked at day 20.

[0099] FIG. 2 shows synapsin-1 as a representative example for the expression of CSPs over the course of disease. Of the 19 peptides that were observed from synapsin-1 across all time points, 17 showed a significant differential expression with peak levels at day 7 (5 representative peptides are shown in FIG. 2). A pair-wise time point contrast from another representative peptide from synapsin-1 is shown in FIG. 3. Here, the AUC for peptide GSHSQSSSPGALTLGR (SEQ ID NO:163) for day 5 vs. day 7 was 0.99 and 0.95 for reference material tagged with the TMT126 and TMT131 isobaric labeling reagents, respectively. The overall p-values for peptide GSHSQSSSPGALTLGR (SEQ ID NO:163) were 8.1E-12 or 1.9E-08 for reference material chemically modified with the TMT126 and TMT131 isobaric labeling reagents, respectively. Correlations of relative peptide expression to post-immunization time were superior to correlations to EAE score (8.8E-01 and 4.4E-01, respectively). The remaining 2 of 19 peptides (QASISGPAPTK (SEQ ID NO:377) and QGPPQKPPGPAGPTR (SEQ ID NO:383)) were outliers, with AUC values less than 0.9 for pair-wise time point contrasts that included day 7 (e.g., day 0 vs. day 7).

[0100] CSPs and other protein biomarkers for MS patients were prioritized and selected from the dataset by excluding non-CSPs with descriptive terms for the protein name found in the Trembl protein database. Consequently, approximately four-fold more peptides (and CSPs) were observed than previously reported by applying the more stringent constraints described above (e.g., overall p-values less than 5.0E-02; AUC calculation). Statistical correlations of peptide expression to EAE score and post-immunization time were also improved and resulted in the identification of new CSP biomarkers, including: synapsin-1 and α-II-spectrin. In addition, the overall p-value previously reported for the peptide LIETYFSK (SEQ ID NO:270) from proteolipid protein 1 improved from 8.0E-04 to 7.9E-12 with the TMT126-labeled reference material. Additional confidence in this result was provided by the TMT131-labeled reference material (overall p-value=4.7E-12). Similar results were obtained for the peptide GLSATVTGGQK (SEQ ID NO:147) from proteolipid protein 1. Lastly, AUC values greater than 0.9 were observed for both peptides.

[0101] In addition to synapsin-1 and α-II-spectrin, differentially expressed CSPs and other proteins included: synapsin-2/3, myelin basic protein, ubiquitin carboxyl-terminal esterase L1, calcium/calmodulin-dependent protein kinase II alpha, neurofilament light and medium, park 2, peroxiredoxin-1/4/5/6, 14-3-3-β/ε/ζ, synaptotagmin, enolase-1/2, guanine nucleotide binding protein α and β1, superoxide dismutase 2, internexin neuronal intermediate filament protein α, tyrosine-protein phosphatase non-receptor type substrate 1, macrophage migration inhibitory factor, proteolipid protein 1, and caspase 7.

[0102] CSP expression waves, revealed with M2 proteomics of brain tissue, were confirmed with ELISAs of representative CSPs in serum specimens from an independent cohort (FIG. 4). Synapsin-1 and α-II-spectrin were selected because of their statistical significance. Serum was collected, pooled and analyzed with ELISAs from mice with EAE scores similar to the EAE scores of mice at the specific post-immunization time points that were analyzed with M2 proteomics. A strong correlation between the levels of synapsin-1 and α-II-spectrin in brain tissue and serum was observed, with peak levels at day 7 (FIG. 4).

[0103] To provide a better understanding of the mechanism underlying the characteristic CSP expression waves, CNS-infiltrating inflammatory cell responses were investigated by immunoassays over the course of EAE. Cytokine ELISPOT assays showed that neuroantigen-reactive T cells producing two well-studied pathogenic cytokines (IFN-γ, and IL-17) could be detected in spleen tissue as early as day 5 after disease induction, and T cell responses peaked by day 15 (FIG. 5). In contrast, notable neuroantigen-specific T cell responses could be detected in the brain by day 10, coinciding with the onset of EAE. Consistent with previous findings, the frequencies of cytokine-producing T cells in brain tissue peaked by day 20, coinciding with peak EAE disease scores (Raphael et al., Electrophoresis 33, 3810-3819, 2012; Mahesula et al., Electrophoresis 33, 3820-3829, 2012). Importantly, the frequencies of neuroantigen-reactive T cells were negligible on day 7, consistent with the very low number of inflammatory cells detectable in the CNS at this time point (data not shown). In agreement with the notion that very few inflammatory cells were present in the CNS by day 7 after induction of disease, M2 proteomics of CD4 (a representative marker of CNS-infiltrating T cells) before day 10. Consistent with cytokine ELISPOT results, CD4 expression increased with the onset of disease at day 10 and peaked in brain tissue by day 20.

[0104] Overall, the results showed a disproportional relationship between the significant changes in CSP expression detected at day 7 and the very low number of CNS-infiltrating inflammatory cell responses at this time point. Since the magnitude of the peripheral (e.g. spleen or blood) neuroantigen-specific immune response was not correlated to EAE onset or severity, the results show that CSPs are more sensitive biomarkers for inflammatory demyelinating CNS disease than inflammatory biomarkers such as cytokines. Moreover, CSPs are also expected to be more specific biomarkers for early detection of EAE because they are not expected at appreciable levels in healthy controls, whereas neuroantigen-specific immune responses can be detected in healthy individuals (Encinas et al., Journal of immunology 157, 2186-2192, 1996; Bahmanyar et al., Journal of neuroimmunology 5, 191-196, 1983).

[0105] Stratification of risk groups was further investigated with non-supervised and supervised hierarchical clustering of relative peptide expression and/or post-immunization time. Non-supervised hierarchical clustering did not accurately stratify subjects by post-immunization time. However, many nearest neighbor misclassifications, where subjects were incorrectly grouped adjacent to one another rather than one group removed from one another, such misclassifications between day −1 and day 0 or day 10 and day 15, were observed across all top-ranked proteins (FIG. 6A). In contrast, supervised hierarchical clustering of all top-ranked proteins recapitulated the AUC calculations. Along these lines, supervised hierarchical clustering showed that peak levels of 17 of 19 peptides from synapsin-1 clustered at day 7 (selected peptides shown in FIG. 6B). Furthermore, visual inspection revealed the same two outliers (QASISGPAPTK (SEQ ID NO:377) and QGPPQKPPGPAGPTR (SEQ ID NO:383)) that were observed in the AUC calculations. Overall, these results suggest that M2 proteomics classifiers can be constructed to stratify risk groups based on post-immunization time, which can be used as a model for progression/regression.

[0106] Pathway and network analysis showed enrichment of differentially expressed CSPs and other proteins in specific signaling pathways and molecular networks. For example, P-values for enrichment of the top-ranked molecular network entitled “neurological disease and motor dysfunction” in the Ingenuity knowledgebase were most significant at day 7, coinciding with characteristic CSP expression waves. Enrichment of other key pathways that might be important to MS patients, such as the 14-3-3 signaling pathway, were also observed to peak at day 7.

[0107] M2 proteomics of brain tissue has been shown to be an effective means to prioritize CSP biomarkers for immunoassays in CSF and serum, by measuring changes in the brain during the disease as previously suggested (Raphael et al., Electrophoresis 33, 3810-3819, 2012; Hu et al., Proteomics 6, 4321-4334, 2006; Robinson et al., Opinion. Current opinion in immunology 15, 660-667, 2003). First, M2 proteomics of CSPs in brain tissue was shown to reveal characteristic CSP expression waves that preceded the onset of clinical EAE symptoms. Second, the CNS-infiltrating inflammatory cell response and CSP expression trajectories in serum were confirmed with cytokine ELISPOT and ELISA immunoassays, respectively, for selected CSPs found to have significant expression changes prior to clinical onset. Based on these results M2 proteomics of CSPs in brain tissue is an effective means to prioritize CSP biomarkers for immunoassays in serum and/or other body fluids (e.g., CSF).

TABLE 1
Synapsin 1 (A2AE14_MOUSE) peptides with an AUC greater than 0.9.

| Post-immunization | | | | | | |
|---|---|---|---|---|---|---|
| time contrast (e.g., | | | | | Overall p- | Overall p- |
| day 0 vs. day 7) | | Peptide Sequence | AUC126 | AUC131 | value 126 | value 131 |
| -1 | 5 | VKVDNQHDFQDIASVVALTK (SEQ ID NO: 499) | 1.00 | 1.00 | 5.0E-09 | 1.9E-13 |
| -1 | 7 | LGTEEFPLIDQTFYPNHK (SEQ ID NO: 265) | 0.98 | 0.98 | 3.6E-05 | 9.5E-04 |
| -1 | 7 | MGHAHSGMGK (SEQ ID NO: 341) | 1.00 | 0.99 | 1.6E-25 | 5.9E-22 |
| -1 | 7 | QHAFSMAR (SEQ ID NO: 384) | 1.00 | 1.00 | 1.3E-19 | 4.1E-14 |
| -1 | 7 | TSVSGNWK (SEQ ID NO: 475) | 1.00 | 0.99 | 1.7E-10 | 1.7E-09 |
| -1 | 7 | VKVDNQHDFQDIASVVALTK (SEQ ID NO: 499) | 1.00 | 1.00 | 5.0E-09 | 1.9E-13 |
| -1 | 7 | VLLVIDEPHTDWAK (SEQ ID NO: 503) | 0.98 | 0.99 | 5.9E-14 | 4.6E-13 |
| -1 | 10 | KLGTEEFPLIDQTFYPNHK (SEQ ID NO: 235) | 0.94 | 0.96 | 3.6E-04 | 1.4E-06 |
| -1 | 10 | LGTEEFPLIDQTFYPNHK (SEQ ID NO: 265) | 0.98 | 0.94 | 3.6E-05 | 9.5E-04 |
| -1 | 10 | QHAFSMAR (SEQ ID NO: 384) | 0.90 | 0.92 | 1.3E-19 | 4.1E-14 |
| -1 | 10 | TSVSGNWK (SEQ ID NO: 475) | 0.98 | 0.96 | 1.7E-10 | 1.7E-09 |
| -1 | 10 | VKVDNQHDFQDIASVVALTK (SEQ ID NO: 499) | 1.00 | 1.00 | 5.0E-09 | 1.9E-13 |
| -1 | 15 | LGTEEFPLIDQTFYPNHK (SEQ ID NO: 265) | 0.94 | 0.97 | 3.6E-05 | 9.5E-04 |
| -1 | 15 | MGHAHSGMGK (SEQ ID NO: 341) | 0.94 | 0.95 | 1.6E-25 | 5.9E-22 |
| -1 | 15 | QHAFSMAR (SEQ ID NO: 384) | 0.93 | 0.96 | 1.3E-19 | 4.1E-14 |
| -1 | 15 | TSVSGNWK (SEQ ID NO: 475) | 0.95 | 0.95 | 1.7E-10 | 1.7E-09 |
| -1 | 20 | VKVDNQHDFQDIASVVALTK (SEQ ID NO: 499) | 0.96 | 1.00 | 5.0E-09 | 1.9E-13 |
| 0 | 7 | MGHAHSGMGK (SEQ ID NO: 341) | 0.99 | 0.96 | 1.6E-25 | 5.9E-22 |
| 0 | 7 | QHAFSMAR (SEQ ID NO: 384) | 1.00 | 1.00 | 1.3E-19 | 4.1E-14 |
| 0 | 7 | SLKPDFVLIR (SEQ ID NO: 434) | 0.95 | 0.94 | 1.6E-11 | 5.0E-10 |
| 0 | 7 | VKVDNQHDFQDIASVVALTK (SEQ ID NO: 499) | 1.00 | 1.00 | 5.0E-09 | 1.9E-13 |
| 0 | 7 | VLLVIDEPHTDWAK (SEQ ID NO: 503) | 0.96 | 0.91 | 5.9E-14 | 4.6E-13 |
| 5 | 7 | EMLSSTTYPVVVK (SEQ ID NO: 91) | 0.92 | 0.95 | 1.7E-07 | 1.6E-03 |
| 5 | 7 | GSHSQSSSPGALTLGR (SEQ ID NO: 163) | 0.99 | 0.95 | 8.1E-12 | 1.9E-08 |
| 5 | 7 | MGHAHSGMGK (SEQ ID NO: 341) | 0.99 | 0.98 | 1.6E-25 | 5.9E-22 |

[0108] Proteomics analysis of CNS in the pre-onset phase reveals a list of biomarkers to predict disease onset. M2-proteomics identified several potential protein biomarkers in a pre-clinical model (EAE) of MS (for example see table 1 and FIG. 8). Potential biomarkers were prioritized using statistical analysis, bioinformatics tools and protein expression-trajectories. CNS-proteome analysis during the pre-onset phase of EAE revealed biomarkers which were detectable in mouse serum. Candidate predictive biomarkers for clinical-onset include: SYN-2, Syt-1, ENO-2, NEF-L, CAMK-2A (FIGS. 2, 3, 9, 10, 11, and 12). ATP1a2 may a potential diagnostic biomarker. SYN-3, PARK-2 and NEF-H did not show potential predictive values (for clinical onset) in serum.

What is claimed is:

1. A method of evaluating a patient suspected of having a central nervous system (CNS) disease comprising:
measuring the level of at least one protein biomarker or peptide biomarker selected from SEQ ID NO:1 to SEQ ID NO:544 in a biologic sample from the patient, wherein the patient is suspected of having, is at risk of developing, or has been diagnosed with a CNS disease;
classifying the subject based on the levels of at least one biomarker associated with a CNS disease or a CNS injury.

2. The method of claim 1, further comprising measuring the level of at least one protein biomarker or peptide biomarker in a plurality of samples from the patient, each sample obtained at a different time, and determining the trajectory of an expression wave for the at least one protein biomarker or peptide biomarker measured.

3. The method of claim 1, wherein the at least one protein comprises one or more of α-II-spectrin, synapsin-1/2/3, myelin basic protein, ubiquitin carboxyl-terminal esterase L1, calcium/calmodulin-dependent protein kinase II alpha, neurofilament light and medium, parkin 2, peroxiredoxin-1/4/5/6, 14-3-3-β/ε/ζ, synaptotagmin, enolase-1/2, guanine nucleotide binding protein α and β1, superoxide dismutase 2, internexin neuronal intermediate filament protein α, tyrosine-protein phosphatase non-receptor type substrate 1, macrophage migration inhibitory factor, proteolipid protein 1, or caspase 7, and combinations thereof.

4. The method of claim 1, wherein the peptide biomarker comprises one or more of a peptide having the amino acid sequence of SEQ ID NO:1 to 544.

5. The method of claim 1, wherein the protein biomarker or peptide biomarker is measured using mass spectrometry.

6. The method of claim 5, wherein the sample is labeled using isobaric labels.

7. The method of claim 6, wherein the sample is prepared using microwave and magnetic sample preparation.

8. The method of claim 1, wherein the protein biomarker or peptide biomarker is measured using an immunoassay.

9. The method of claim 8, wherein the immunoassay is an ELISA or an antibody array.

10. The method of claim 1, wherein the CNS disease is multiple sclerosis.

11. A method of detecting a preclinical expression wave comprising measuring biomarker levels in two or more samples from a patient that were obtained at different times and determining the rate of change of biomarker expression.

The application's sequence listing, which the Patent Office published only in electronic form, follows.

SEQUENCE LISTING (923 sequences)

SEQ ID NO: 1 - protein, 6 aa, Artificial Sequence
  synthetic peptide
AACYTK

SEQ ID NO: 2 - protein, 20 aa, Artificial Sequence
  synthetic peptide
AAELIANSLATAGDGLIELR

SEQ ID NO: 3 - protein, 29 aa, Artificial Sequence
  synthetic peptide
AAFDDAIAELDTLSEESYKDSTLIMQLLR

SEQ ID NO: 4 - protein, 6 aa, Artificial Sequence
  synthetic peptide
AAQQTK

SEQ ID NO: 5 - protein, 9 aa, Artificial Sequence
  synthetic peptide
AASELIKSK

SEQ ID NO: 6 - protein, 18 aa, Artificial Sequence
  synthetic peptide
AAVASLLQSVQVPEFTPK

SEQ ID NO: 7 - protein, 15 aa, Artificial Sequence
  synthetic peptide
AAVENLPTFLVELSR

SEQ ID NO: 8 - protein, 24 aa, Artificial Sequence
  synthetic peptide
AAVPSGASTGIYEALELRDNDKTR

SEQ ID NO: 9 - protein, 8 aa, Artificial Sequence
  synthetic peptide
ACNCLLLK

SEQ ID NO: 10 - protein, 24 aa, Artificial Sequence
  synthetic peptide
ADQELMTYSHDNIICGITSVSFSK

SEQ ID NO: 11 - protein, 29 aa, Artificial Sequence
  synthetic peptide
AFADAMEVIPSTLAENAGLNPISTVTELR

SEQ ID NO: 12 - protein, 31 aa, Artificial Sequence
  synthetic peptide
AFAMIIDKLEEDISSSMTNSTAASRPPVTLR

SEQ ID NO: 13 - protein, 19 aa, Artificial Sequence
  synthetic peptide
AFGFSHLEALLDDSKELQR

SEQ ID NO: 14 - protein, 20 aa, Artificial Sequence
  synthetic peptide
AFITVLEMTPVLGTEIINYR

SEQ ID NO: 15 - protein, 11 aa, Artificial Sequence
  synthetic peptide
AFLTLAEDILR

SEQ ID NO: 16 - protein, 27 aa, Artificial Sequence
  synthetic peptide
AGIPKEEVKEVYMGNVIQGGEGQAPTR

SEQ ID NO: 17 - protein, 13 aa, Artificial Sequence
  synthetic peptide
AGQVFLEELGNHK

SEQ ID NO: 18 - protein, 10 aa, Artificial Sequence
  synthetic peptide
AHCIQQMTSK

SEQ ID NO: 19 - protein, 7 aa, Artificial Sequence
  synthetic peptide
AHQAEGK

SEQ ID NO: 20 - protein, 41 aa, Artificial Sequence
  synthetic peptide
AHVTLGCAADVQPVQTGLDLLDILQQVKGGSQGEAVGELPR

SEQ ID NO: 21 - protein, 17 aa, Artificial Sequence
  synthetic peptide
AIATLMSDEVFHDIAYK

SEQ ID NO: 22 - protein, 7 aa, Artificial Sequence
  synthetic peptide
AIGNALK

SEQ ID NO: 23 - protein, 23 aa, Artificial Sequence
  synthetic peptide
ALELVGQLQDQTVLPRAQPSLMR

SEQ ID NO: 24 - protein, 7 aa, Artificial Sequence
  synthetic peptide
ALFHAAK

SEQ ID NO: 25 - protein, 33 aa, Artificial Sequence
  synthetic peptide
ALLENMEGLFLAVDEIVDGGVILESDPQQVVHR

SEQ ID NO: 26 - protein, 23 aa, Artificial Sequence
  synthetic peptide
ALNVEPDGTGLTCSLAPNILSQL

SEQ ID NO: 27 - protein, 19 aa, Artificial Sequence
  synthetic peptide
ALSEIAGITLPYDTLDQVR

SEQ ID NO: 28 - protein, 15 aa, Artificial Sequence
  synthetic peptide
ALTVPELTQQMFDAK

SEQ ID NO: 29 - protein, 7 aa, Artificial Sequence
  synthetic peptide
ALVILAK

SEQ ID NO: 30 - protein, 16 aa, Artificial Sequence
  synthetic peptide
ALYDTFSAFGNILSCK

SEQ ID NO: 31 - protein, 8 aa, Artificial Sequence
  synthetic peptide
ALYEQEIR

SEQ ID NO: 32 - protein, 11 aa, Artificial Sequence
  synthetic peptide
ANALVQFLLVK

SEQ ID NO: 33 - protein, 15 aa, Artificial Sequence
  synthetic peptide
APSMVAAAVTYSKPR

SEQ ID NO: 34 - protein, 16 aa, Artificial Sequence
  synthetic peptide
AQLQDLNDRFASFIER

SEQ ID NO: 35 - protein, 9 aa, Artificial Sequence
  synthetic peptide
AQYESLAAK

SEQ ID NO: 36 - protein, 16 aa, Artificial Sequence
  synthetic peptide
ASAVRVGQLQEALNER

SEQ ID NO: 37 - protein, 24 aa, Artificial Sequence
  synthetic peptide
ASDSPIDLFYGDFVGDISEAVIQK

SEQ ID NO: 38 - protein, 7 aa, Artificial Sequence
  synthetic peptide
ASQTMAK

SEQ ID NO: 39 - protein, 32 aa, Artificial Sequence
  synthetic peptide
ASTAAPVASPAAPSPGSSGGGGFFSSLSNAVK

SEQ ID NO: 40 - protein, 17 aa, Artificial Sequence
  synthetic peptide
ATDLLLDDSLVSLFGNR

SEQ ID NO: 41 - protein, 18 aa, Artificial Sequence
  synthetic peptide
ATDLLLDDSLVSLFGNRR

SEQ ID NO: 42 - protein, 19 aa, Artificial Sequence
  synthetic peptide
ATGMDVRNGTDKDAGALFK

SEQ ID NO: 43 - protein, 10 aa, Artificial Sequence
  synthetic peptide
ATTHEVMGPK

SEQ ID NO: 44 - protein, 23 aa, Artificial Sequence
  synthetic peptide
AVAQLTYHSLCPPDDLANRGLLR

SEQ ID NO: 45 - protein, 23 aa, Artificial Sequence
  synthetic peptide
AVELLVELASLQTSFVTLDEAIK

SEQ ID NO: 46 - protein, 8 aa, Artificial Sequence
  synthetic peptide
AVMEIMTK

SEQ ID NO: 47 - protein, 25 aa, Artificial Sequence
  synthetic peptide
AVSDASAGDYGSAIETLVTAISLIK

SEQ ID NO: 48 - protein, 16 aa, Artificial Sequence
  synthetic peptide
CIQEQDFQGFAQLTMK

SEQ ID NO: 49 - protein, 13 aa, Artificial Sequence
  synthetic peptide
CNLEKVQMVLQEK

SEQ ID NO: 50 - protein, 19 aa, Artificial Sequence
  synthetic peptide
DASVAEAWLLGQEPYLSSR

SEQ ID NO: 51 - protein, 16 aa, Artificial Sequence
  synthetic peptide
DDGAAILVAVSNMVQK

SEQ ID NO: 52 - protein, 9 aa, Artificial Sequence
  synthetic peptide
DEQGLVLIK

SEQ ID NO: 53 - protein, 11 aa, Artificial Sequence
  synthetic peptide
DFPQYFAVVSR

SEQ ID NO: 54 - protein, 11 aa, Artificial Sequence
  synthetic peptide
DGSVAIASKPR

SEQ ID NO: 55 - protein, 12 aa, Artificial Sequence
  synthetic peptide
DIINAARASLAK

SEQ ID NO: 56 - protein, 28 aa, Artificial Sequence
  synthetic peptide
DIKEKLCYVALDFEQEMATAASSSSLEK

SEQ ID NO: 57 - protein, 28 aa, Artificial Sequence
  synthetic peptide
DIPNGATLLVGGFGLCGIPENLIGALLK

SEQ ID NO: 58 - protein, 15 aa, Artificial Sequence
  synthetic peptide
DIQSIRGLAVDWVSR

SEQ ID NO: 59 - protein, 11 aa, Artificial Sequence
  synthetic peptide
DITYFIQQLLR

SEQ ID NO: 60 - protein, 14 aa, Artificial Sequence
  synthetic peptide
DLAILLGMLDPVEK

SEQ ID NO: 61 - protein, 10 aa, Artificial Sequence
  synthetic peptide
DLASVQALLR

SEQ ID NO: 62 - protein, 12 aa, Artificial Sequence
  synthetic peptide
DLKPDNIMIDNK

SEQ ID NO: 63 - protein, 12 aa, Artificial Sequence
  synthetic peptide
DLKPENLLLASK

SEQ ID NO: 64 - protein, 18 aa, Artificial Sequence
  synthetic peptide
DLQKFQSNQLAQKSQDSR

SEQ ID NO: 65 - protein, 10 aa, Artificial Sequence
  synthetic peptide
DLTTFLYHLR

SEQ ID NO: 66 - protein, 16 aa, Artificial Sequence
  synthetic peptide
DQLSQHQELLLEQIAK

SEQ ID NO: 67 - protein, 15 aa, Artificial Sequence
  synthetic peptide
DREGFFTNGLTLGAK

SEQ ID NO: 68 - protein, 10 aa, Artificial Sequence
  synthetic peptide
DSTLIMQLLR

SEQ ID NO: 69 - protein, 16 aa, Artificial Sequence
  synthetic peptide
DTAAAGQGERNHLITK

SEQ ID NO: 70 - protein, 10 aa, Artificial Sequence
  synthetic peptide
DTGILDSIGR

SEQ ID NO: 71 - protein, 22 aa, Artificial Sequence
  synthetic peptide
DVAWLGDCDQGCLALADLLGWK

SEQ ID NO: 72 - protein, 16 aa, Artificial Sequence
  synthetic peptide
EATADDLIKVVEELTR

SEQ ID NO: 73 - protein, 22 aa, Artificial Sequence
  synthetic peptide
EDIQLLSCRMTALEKQVAEILK

SEQ ID NO: 74 - protein, 18 aa, Artificial Sequence
  synthetic peptide
EDSGTYVCTAENSVGFVK

SEQ ID NO: 75 - protein, 20 aa, Artificial Sequence
  synthetic peptide
EEVQAGVDAANSAAQQYQRR

SEQ ID NO: 76 - protein, 14 aa, Artificial Sequence
  synthetic peptide
EFATLIIDILSEAK

SEQ ID NO: 77 - protein, 11 aa, Artificial Sequence
  synthetic peptide
EFNGLGDCLTK

SEQ ID NO: 78 - protein, 31 aa, Artificial Sequence
  synthetic peptide
EGKQPALPMSNLHEATMPVLFDHLRETRADK

SEQ ID NO: 79 - protein, 28 aa, Artificial Sequence
  synthetic peptide
EGNASGVSLLEALDTILPPTRPTDKPLR

SEQ ID NO: 80 - protein, 30 aa, Artificial Sequence
  synthetic peptide
EGSGGGGGMDDIFSHIFGGGLFGFMGNQSR

SEQ ID NO: 81 - protein, 10 aa, Artificial Sequence
  synthetic peptide
EHMQPTHPIR

SEQ ID NO: 82 - protein, 8 aa, Artificial Sequence
  synthetic peptide
EHTAYLIK

SEQ ID NO: 83 - protein, 33 aa, Artificial Sequence
  synthetic peptide
EIAESSMFNLLEMDIEQVSQLSALVQAQLEYHK

SEQ ID NO: 84 - protein, 16 aa, Artificial Sequence
  synthetic peptide
EIEIAEQDMSALISLR

SEQ ID NO: 85 - protein, 21 aa, Artificial Sequence
  synthetic peptide
EIERMVSIIHRKFSSIQMQLK

SEQ ID NO: 86 - protein, 20 aa, Artificial Sequence
  synthetic peptide
EKIEAELQDICNDVLELLDK

SEQ ID NO: 87 - protein, 24 aa, Artificial Sequence
  synthetic peptide
EKIEKELEAVCQDVLSLLDNYLIK

SEQ ID NO: 88 - protein, 23 aa, Artificial Sequence
  synthetic peptide
EKPELQFPFLQDEDTVATLHECK

SEQ ID NO: 89 - protein, 19 aa, Artificial Sequence
  synthetic peptide
ELEAVCQDVLSLLDNYLIK

SEQ ID NO: 90 - protein, 25 aa, Artificial Sequence
  synthetic peptide
ELNIDVADVESLLVQCILDNTIHGR

SEQ ID NO: 91 - protein, 13 aa, Artificial Sequence
  synthetic peptide
EMLTLPTFPVVVK

SEQ ID NO: 92 - protein, 14 aa, Artificial Sequence
  synthetic peptide
EMQKLPEAVQLIEK

SEQ ID NO: 93 - protein, 9 aa, Artificial Sequence
  synthetic peptide
EMQPTHPIR

SEQ ID NO: 94 - protein, 9 aa, Artificial Sequence
  synthetic peptide
EQSSKQTTK

SEQ ID NO: 95 - protein, 21 aa, Artificial Sequence
  synthetic peptide
ETEAEAQEVSLPALLMEHLDK

SEQ ID NO: 96 - protein, 34 aa, Artificial Sequence
  synthetic peptide
ETGMVFGILRCSLGFHAEAIVQGTLGLNCCELLK

SEQ ID NO: 97 - protein, 26 aa, Artificial Sequence
  synthetic peptide
EVDFDTFFTSSKMITLDSIYFQPGSR

SEQ ID NO: 98 - protein, 21 aa, Artificial Sequence
  synthetic peptide
EVIQELNNCQVTVAHINATAK

SEQ ID NO: 99 - protein, 11 aa, Artificial Sequence
  synthetic peptide
EVMQMLVELAK

SEQ ID NO: 100 - protein, 37 aa, Artificial Sequence
  synthetic peptide
FADVLGLEEETLGSVPSPACALLLLFPLTAQHENFRK

SEQ ID NO: 101 - protein, 27 aa, Artificial Sequence
  synthetic peptide
FAIVDSTRQAGVGLLTYPSQPTGTLLK

SEQ ID NO: 102 - protein, 19 aa, Artificial Sequence
  synthetic peptide
FANSLVGVQQQLQAFNTYR

SEQ ID NO: 103 - protein, 23 aa, Artificial Sequence
  synthetic peptide
FASVFYTNVVPMLNPLIYSLRNK

SEQ ID NO: 104 - protein, 19 aa, Artificial Sequence
  synthetic peptide
FDLGQDVIDFTGHSLALYR

SEQ ID NO: 105 - protein, 36 aa, Artificial Sequence
  synthetic peptide
FEAPEALFQPHLINVEGVGVAELLFNTIQAADIDTR

SEQ ID NO: 106 - protein, 15 aa, Artificial Sequence
  synthetic peptide
FGANAILGVSLAVCK

SEQ ID NO: 107 - protein, 13 aa, Artificial Sequence
  synthetic peptide
FGDMQEIIQNFVR

SEQ ID NO: 108 - protein, 19 aa, Artificial Sequence
  synthetic peptide
FGIICMEDLIHEIYTVGKR

SEQ ID NO: 109 - protein, 9 aa, Artificial Sequence
  synthetic peptide
FIPFIGVVK

SEQ ID NO: 110 - protein, 9 aa, Artificial Sequence
  Peptide fragment
FLDFIGHIL

SEQ ID NO: 111 - protein, 21 aa, Artificial Sequence
  Peptide fragment
FLVLDEADGLLSQGYSDFINR

SEQ ID NO: 112 - protein, 11 aa, Artificial Sequence
  synthetic peptide
FPGQLNADLRK

SEQ ID NO: 113 - protein, 11 aa, Artificial Sequence
  synthetic peptide
FSMVIDNGIVK

SEQ ID NO: 114 - protein, 24 aa, Artificial Sequence
  synthetic peptide
FSTGGLSISGLNPLPNPSYLLPPR

SEQ ID NO: 115 - protein, 17 aa, Artificial Sequence
  synthetic peptide
FSWGAEGQKPGFGYGGR

SEQ ID NO: 116 - protein, 13 aa, Artificial Sequence
  synthetic peptide
FTEEYQLFEELGK

SEQ ID NO: 117 - protein, 20 aa, Artificial Sequence
  synthetic peptide
FTEEYQLFEELGKGAFSVVR

SEQ ID NO: 118 - protein, 10 aa, Artificial Sequence
  synthetic peptide
FTVLTESAAK

SEQ ID NO: 119 - protein, 34 aa, Artificial Sequence
  synthetic peptide
FTVMIVFQDVNIGLSPQLSVKLDAVLCVNNPSTR

SEQ ID NO: 120 - protein, 15 aa, Artificial Sequence
  synthetic peptide
FTVTPSTTQVVGILK

SEQ ID NO: 121 - protein, 16 aa, Artificial Sequence
  synthetic peptide
FWQDLMNIAGTTLSSK

SEQ ID NO: 122 - protein, 7 aa, Artificial Sequence
  synthetic peptide
FYALSAK

SEQ ID NO: 123 - protein, 9 aa, Artificial Sequence
  synthetic peptide
FYFENLLAK

SEQ ID NO: 124 - protein, 7 aa, Artificial Sequence
  synthetic peptide
GAFSVVR

SEQ ID NO: 125 - protein, 11 aa, Artificial Sequence
  synthetic peptide
GAPLVVICQGK

SEQ ID NO: 126 - protein, 21 aa, Artificial Sequence
  synthetic peptide
GAQVVACLSVNDVFVIEEWGR

SEQ ID NO: 127 - protein, 25 aa, Artificial Sequence
  synthetic peptide
GATPYGGVKLEDLIVKDGLTDVYNK

SEQ ID NO: 128 - protein, 8 aa, Artificial Sequence
  synthetic peptide
GAWSNVLR

SEQ ID NO: 129 - protein, 11 aa, Artificial Sequence
  synthetic peptide
GAYDAQGTLSK

SEQ ID NO: 130 - protein, 22 aa, Artificial Sequence
  synthetic peptide
GCGTAMLQDFTQQVHVIEMLQK

SEQ ID NO: 131 - protein, 14 aa, Artificial Sequence
  synthetic peptide
GDVTTQVALQPALK

SEQ ID NO: 132 - protein, 14 aa, Artificial Sequence
  synthetic peptide
GFKGAYDAQGTLSK

SEQ ID NO: 133 - protein, 17 aa, Artificial Sequence
  synthetic peptide
GFVPDTPVGVAHFLLQR

SEQ ID NO: 134 - protein, 18 aa, Artificial Sequence
  synthetic peptide
GGPNIITLADIVKDPVSR

SEQ ID NO: 135 - protein, 19 aa, Artificial Sequence
  synthetic peptide
GIFEALRPLETLPVEGLIR

SEQ ID NO: 136 - protein, 14 aa, Artificial Sequence
  synthetic peptide
GILAADESVGSMAK

SEQ ID NO: 137 - protein, 33 aa, Artificial Sequence
  synthetic peptide
GILVGIKVDKGVVPLAGTDGETTTQGLDGLLER

SEQ ID NO: 138 - protein, 12 aa, Artificial Sequence
  synthetic peptide
GILVNMDDNIVK

SEQ ID NO: 139 - protein, 17 aa, Artificial Sequence
  synthetic peptide
GITWGEDTLMEYLENPK

SEQ ID NO: 140 - protein, 18 aa, Artificial Sequence
  synthetic peptide
GIVDQSQQAYQEAFEISK

SEQ ID NO: 141 - protein, 16 aa, Artificial Sequence
  synthetic peptide
GIYAYGFEKPSAIQQR

SEQ ID NO: 142 - protein, 12 aa, Artificial Sequence
  synthetic peptide
GLFIIDDKGILR

SEQ ID NO: 143 - protein, 25 aa, Artificial Sequence
  synthetic peptide
GLGSDLDSSLASLVGNLGISGTTSK

SEQ ID NO: 144 - protein, 13 aa, Artificial Sequence
  synthetic peptide
GLLAGNVFDWGAK

SEQ ID NO: 145 - protein, 34 aa, Artificial Sequence
  synthetic peptide
GLPFGCSKEEIVQFFSGLEIVPNGITLPVDFQGR

SEQ ID NO: 146 - protein, 7 aa, Artificial Sequence
  Peptide fragment
GLPGSGK

SEQ ID NO: 147 - protein, 11 aa, Artificial Sequence
  synthetic peptide
GLSATVTGGQK

SEQ ID NO: 148 - protein, 19 aa, Artificial Sequence
  synthetic peptide
GLTEQEVETILDKAMVLFR

SEQ ID NO: 149 - protein, 17 aa, Artificial Sequence
  synthetic peptide
GLTVQQWDAIYVDLPNR

SEQ ID NO: 150 - protein, 9 aa, Artificial Sequence
  synthetic peptide
GLVGEIIKR

SEQ ID NO: 151 - protein, 16 aa, Artificial Sequence
  synthetic peptide
GMGGAFVLVLYDEIKK

SEQ ID NO: 152 - protein, 18 aa, Artificial Sequence
  synthetic peptide
GMGGAFVLVLYDEIKKYV

SEQ ID NO: 153 - protein, 16 aa, Artificial Sequence
  synthetic peptide
GMTLVTPLQLLLFASK

SEQ ID NO: 154 - protein, 8 aa, Artificial Sequence
  synthetic peptide
GNLANVIR

SEQ ID NO: 155 - protein, 13 aa, Artificial Sequence
  synthetic peptide
GNLEVLLFTIQSK

SEQ ID NO: 156 - protein, 23 aa, Artificial Sequence
  synthetic peptide
GPGLGSTQGQTIALPAQGLIEFR

SEQ ID NO: 157 - protein, 19 aa, Artificial Sequence
  synthetic peptide
GPGTSFEFALAIVEALVGK

SEQ ID NO: 158 - protein, 17 aa, Artificial Sequence
  synthetic peptide
GPGYPQAEALLAEAMLK

SEQ ID NO: 159 - protein, 15 aa, Artificial Sequence
  synthetic peptide
GPIKFNVWDTAGQEK

SEQ ID NO: 160 - protein, 10 aa, Artificial Sequence
  synthetic peptide
GQSVSLKCPR

SEQ ID NO: 161 - protein, 15 aa, Artificial Sequence
  synthetic peptide
GQYFGELALVTNKPR

SEQ ID NO: 162 - protein, 12 aa, Artificial Sequence
  synthetic peptide
GRATHIVQVMSR

SEQ ID NO: 163 - protein, 16 aa, Artificial Sequence
  synthetic peptide
GSHSQSSSPGALTLGR

SEQ ID NO: 164 - protein, 10 aa, Artificial Sequence
  synthetic peptide
GSLSGWILSK

SEQ ID NO: 165 - protein, 28 aa, Artificial Sequence
  synthetic peptide
GVFHGIENFINEASYMSILGMTPGFGDK

SEQ ID NO: 166 - protein, 34 aa, Artificial Sequence
  synthetic peptide
GVGVNEYGLPMAVAQVLSQSLAQNLGIQWEPSSR

SEQ ID NO: 167 - protein, 16 aa, Artificial Sequence
  synthetic peptide
GVLFGVPGAFTPGCSK

SEQ ID NO: 168 - protein, 27 aa, Artificial Sequence
  synthetic peptide
GVQDIVVGEGTHFLIPWVQKPIIFDCR

SEQ ID NO: 169 - protein, 13 aa, Artificial Sequence
  synthetic peptide
GVQVETISPGDGR

SEQ ID NO: 170 - protein, 21 aa, Artificial Sequence
  synthetic peptide
GVQYLNEIKDSVVAGFQWATK

SEQ ID NO: 171 - protein, 14 aa, Artificial Sequence
  synthetic peptide
GVVDSEDIPLNLSR

SEQ ID NO: 172 - protein, 20 aa, Artificial Sequence
  synthetic peptide
GWFEPIVEDMHRQWANLMEK

SEQ ID NO: 173 - protein, 14 aa, Artificial Sequence
  synthetic peptide
GYSFTTTAEREIVR

SEQ ID NO: 174 - protein, 10 aa, Artificial Sequence
  synthetic peptide
HAASNMLRDK

SEQ ID NO: 175 - protein, 11 aa, Artificial Sequence
  synthetic peptide
HFVALSTNTAK

SEQ ID NO: 176 - protein, 6 aa, Artificial Sequence
  synthetic peptide
HGFLPR

SEQ ID NO: 177 - protein, 10 aa, Artificial Sequence
  synthetic peptide
HHLEALQSSK

SEQ ID NO: 178 - protein, 20 aa, Artificial Sequence
  synthetic peptide
HPPVAVLPLGTGNDLARCLR

SEQ ID NO: 179 - protein, 11 aa, Artificial Sequence
  synthetic peptide
HQGVMVGMGQK

SEQ ID NO: 180 - protein, 20 aa, Artificial Sequence
  synthetic peptide
HQILEQAVEDYAETVHQLSK

SEQ ID NO: 181 - protein, 9 aa, Artificial Sequence
  synthetic peptide
IAIYELLFK

SEQ ID NO: 182 - protein, 21 aa, Artificial Sequence
  synthetic peptide
IANDNSLNHEYLPILGLAEFR

SEQ ID NO: 183 - protein, 31 aa, Artificial Sequence
  Synthetic peptide
IAPALISSGISVVEQEKLDNLMLELDGTENK

SEQ ID NO: 184 - protein, 25 aa, Artificial Sequence
  synthetic peptide
ICDPGLTSFEPEALGNLVEGMDFHR

SEQ ID NO: 185 - protein, 12 aa, Artificial Sequence
  synthetic peptide
IDSLMDEIAFLK

SEQ ID NO: 186 - protein, 13 aa, Artificial Sequence
  synthetic peptide
IDSLMDEIAFLKK

SEQ ID NO: 187 - protein, 17 aa, Artificial Sequence
  synthetic peptide
IFATSTEPVLQQELQLK

SEQ ID NO: 188 - protein, 29 aa, Artificial Sequence
  synthetic peptide
IGAGAPVYLAAVLEYLTAEVLELAGNAAR

SEQ ID NO: 189 - protein, 15 aa, Artificial Sequence
  synthetic peptide
IGAGDYQPTEQDILR

SEQ ID NO: 190 - protein, 15 aa, Artificial Sequence
  synthetic peptide
IGGHGAEYGAEALER

SEQ ID NO: 191 - protein, 11 aa, Artificial Sequence
  synthetic peptide
IGGIGTVPVGR

SEQ ID NO: 192 - protein, 10 aa, Artificial Sequence
  synthetic peptide
IGHAHSGMGK

SEQ ID NO: 193 - protein, 9 aa, Artificial Sequence
  synthetic peptide
IGYPAPNFK

SEQ ID NO: 194 - protein, 11 aa, Artificial Sequence
  synthetic peptide
IHEATGMPAGK

SEQ ID NO: 195 - protein, 29 aa, Artificial Sequence
  synthetic peptide
IICILSHPIKNTNDANSCQIIIPQNQVNR

SEQ ID NO: 196 - protein, 9 aa, Artificial Sequence
  synthetic peptide
IIVLGLLPR

SEQ ID NO: 197 - protein, 16 aa, Artificial Sequence
  synthetic peptide
ILDDDTIITTLENLKR

SEQ ID NO: 198 - protein, 14 aa, Artificial Sequence
  synthetic peptide
ILLAELEQLKGQGK

SEQ ID NO: 199 - protein, 9 aa, Artificial Sequence
  synthetic peptide
ILNNDPKSK

SEQ ID NO: 200 - protein, 28 aa, Artificial Sequence
  synthetic peptide
ILQMEEEYIHQLCEDIIQLKPDVVITEK

SEQ ID NO: 201 - protein, 11 aa, Artificial Sequence
  synthetic peptide
ILVTLLHTLER

SEQ ID NO: 202 - protein, 10 aa, Artificial Sequence
  synthetic peptide
IMLPWDPSGK

SEQ ID NO: 203 - protein, 25 aa, Artificial Sequence
  synthetic peptide
INALTAASEAACLIVSVDETIKNPR

SEQ ID NO: 204 - protein, 15 aa, Artificial Sequence
  synthetic peptide
IPAFLNVVDIAGLVK

SEQ ID NO: 205 - protein, 29 aa, Artificial Sequence
  synthetic peptide
IPCVDAGLISPLVQLLNSKDQEVLLQTGR

SEQ ID NO: 206 - protein, 29 aa, Artificial Sequence
  synthetic peptide
IPDRPYSLFEGMAGAVHFLSDILVPETAR

SEQ ID NO: 207 - protein, 32 aa, Artificial Sequence
  synthetic peptide
IPNFWVTTFVNHPQVSALLGEEDEEALHYLTR

SEQ ID NO: 208 - protein, 33 aa, Artificial Sequence
  synthetic peptide
IQSIPLVIGQFLEAVDQNTAIVGSTTGSNYYVR

SEQ ID NO: 209 - protein, 12 aa, Artificial Sequence
  synthetic peptide
IQTQPGYANTLR

SEQ ID NO: 210 - protein, 20 aa, Artificial Sequence
  synthetic peptide
ISDRTPSALAILENANVLAR

SEQ ID NO: 211 - protein, 20 aa, Artificial Sequence
  synthetic peptide
ISGASEKDIVHSGLAYTMER

SEQ ID NO: 212 - protein, 25 aa, Artificial Sequence
  synthetic peptide
ISSMEGERLREEMEEITQQQLVHDK

SEQ ID NO: 213 - protein, 23 aa, Artificial Sequence
  synthetic peptide
ITAEAASFSDMMDVVYVAQMIQK

SEQ ID NO: 214 - protein, 12 aa, Artificial Sequence
  synthetic peptide
ITQYLDAGGIPR

SEQ ID NO: 215 - protein, 23 aa, Artificial Sequence
  synthetic peptide
IVEAVKELDQDTVFALANYILFK

SEQ ID NO: 216 - protein, 17 aa, Artificial Sequence
  synthetic peptide
IVEIVDAITTTAQSHQR

SEQ ID NO: 217 - protein, 12 aa, Artificial Sequence
  synthetic peptide
IVLELFADIVPK

SEQ ID NO: 218 - protein, 29 aa, Artificial Sequence
  synthetic peptide
IVNATWFTNFILLFILLSSAALAAEDPIR

SEQ ID NO: 219 - protein, 22 aa, Artificial Sequence
  synthetic peptide
IYKVPSTEAEALASSLMGLFEK

SEQ ID NO: 220 - protein, 20 aa, Artificial Sequence
  synthetic peptide
KACADATLSQITNNIDPVGR

SEQ ID NO: 221 - protein, 21 aa, Artificial Sequence
  synthetic peptide
KASAFNSWFENAEEDLTDPVR

SEQ ID NO: 222 - protein, 7 aa, Artificial Sequence
  synthetic peptide
KAVEALK

SEQ ID NO: 223 - protein, 26 aa, Artificial Sequence
  synthetic peptide
KDEELEDAIPQSMQDLLCMNNDFPPR

SEQ ID NO: 224 - protein, 11 aa, Artificial Sequence
  synthetic peptide
KEDILADLQNR

SEQ ID NO: 225 - protein, 10 aa, Artificial Sequence
  synthetic peptide
KEMQPTHPIR

SEQ ID NO: 226 - protein, 23 aa, Artificial Sequence
  synthetic peptide
KFQDLCEGNGAPLSSAEDNGQRR

SEQ ID NO: 227 - protein, 10 aa, Artificial Sequence
  synthetic peptide
KGADEAALAR

SEQ ID NO: 228 - protein, 31 aa, Artificial Sequence
  synthetic peptide
KGGISNILEEMVVQPLLVSVSALTLATETVR

SEQ ID NO: 229 - protein, 7 aa, Artificial Sequence
  synthetic peptide
KGIEALK

SEQ ID NO: 230 - protein, 17 aa, Artificial Sequence
  synthetic peptide
KGVLFGVPGAFTPGCSK

SEQ ID NO: 231 - protein, 11 aa, Artificial Sequence
  synthetic peptide
KICTASENFLR

SEQ ID NO: 232 - protein, 27 aa, Artificial Sequence
  synthetic peptide
KIEPELEGSSAVTSHDSSTNGLISFIK

SEQ ID NO: 233 - protein, 32 aa, Artificial Sequence
  synthetic peptide
KINLNHLLNFTFEPRGQAGHFEGSGHGGWGKR

SEQ ID NO: 234 - protein, 6 aa, Artificial Sequence
  synthetic peptide
KIQEIK

SEQ ID NO: 235 - protein, 19 aa, Artificial Sequence
  synthetic peptide
KLGTEEFPLIDQTFYPNHK

SEQ ID NO: 236 - protein, 9 aa, Artificial Sequence
  synthetic peptide
KLLEGEETR

SEQ ID NO: 237 - protein, 6 aa, Artificial Sequence
  synthetic peptide
KLQEIK

SEQ ID NO: 238 - protein, 16 aa, Artificial Sequence
  synthetic peptide
KNDEVSSLDAFLDLIR

SEQ ID NO: 239 - protein, 17 aa, Artificial Sequence
  synthetic peptide
KPPAKDPLADLNIKDFL

SEQ ID NO: 240 - protein, 6 aa, Artificial Sequence
  synthetic peptide
KQEIIK

SEQ ID NO: 241 - protein, 20 aa, Artificial Sequence
  synthetic peptide
KSDIYVCMISFAHNVAAQGK

SEQ ID NO: 242 - protein, 19 aa, Artificial Sequence
  synthetic peptide
KSGQSGSRRTSESTDIDIK

SEQ ID NO: 243 - protein, 9 aa, Artificial Sequence
  synthetic peptide
KTQHSTLSR

SEQ ID NO: 244 - protein, 13 aa, Artificial Sequence
  synthetic peptide
KVESLLDELAFVR

SEQ ID NO: 245 - protein, 9 aa, Artificial Sequence
  synthetic peptide
KVNLAELFK

SEQ ID NO: 246 - protein, 40 aa, Artificial Sequence
  synthetic peptide
LAELNSYVPVTAYTGPLVEDFLSSFQVVVLTNSPLEAQLR

SEQ ID NO: 247 - protein, 16 aa, Artificial Sequence
  synthetic peptide
LAEQAERYDDMAACMK

SEQ ID NO: 248 - protein, 15 aa, Artificial Sequence
  synthetic peptide
LAGTQPLEVLEAVQR

SEQ ID NO: 249 - protein, 7 aa, Artificial Sequence
  synthetic peptide
LAILYAK

SEQ ID NO: 250 - protein, 25 aa, Artificial Sequence
  synthetic peptide
LAPEVLEDLVQNTEFSEQELKQWYK

SEQ ID NO: 251 - protein, 9 aa, Artificial Sequence
  synthetic peptide
LATFWHYAK

SEQ ID NO: 252 - protein, 26 aa, Artificial Sequence
  synthetic peptide
LAYVAAGDLAPINAFIGGLAAQEVMK

SEQ ID NO: 253 - protein, 23 aa, Artificial Sequence
  synthetic peptide
LCYVALDFEQEMATAASSSSLEK

SEQ ID NO: 254 - protein, 39 aa, Artificial Sequence
  synthetic peptide
LCYVALDFEQEMATAASSSSLEKSYELPDGQVITIGNER

SEQ ID NO: 255 - protein, 14 aa, Artificial Sequence
  synthetic peptide
LDLAGRDLTDYLMK

SEQ ID NO: 256 - protein, 19 aa, Artificial Sequence
  synthetic peptide
LDLAGRDLTDYLMKILTER

SEQ ID NO: 257 - protein, 18 aa, Artificial Sequence
  synthetic peptide
LDLEKKVESLLDELAFVR

SEQ ID NO: 258 - protein, 29 aa, Artificial Sequence
  synthetic peptide
LDQEAENLVATVVPTHLAAAVPEVAVYLK

SEQ ID NO: 259 - protein, 9 aa, Artificial Sequence
  synthetic peptide
LEANSEFGK

SEQ ID NO: 260 - protein, 10 aa, Artificial Sequence
  synthetic peptide
LEPIPHRRLR

SEQ ID NO: 261 - protein, 10 aa, Artificial Sequence
  synthetic peptide
LGHAHAGMGK

SEQ ID NO: 262 - protein, 26 aa, Artificial Sequence
  synthetic peptide
LGLALNYSVFYYEIQNAPEQACHLAK

SEQ ID NO: 263 - protein, 9 aa, Artificial Sequence
  synthetic peptide
LGLGLEFQA

SEQ ID NO: 264 - protein, 13 aa, Artificial Sequence
  synthetic peptide
LGLSLVVPGGGIK

SEQ ID NO: 265 - protein, 18 aa, Artificial Sequence
  synthetic peptide
LGTEEFPLIDQTFYPNHK

SEQ ID NO: 266 - protein, 8 aa, Artificial Sequence
  synthetic peptide
LGVAGQWR

SEQ ID NO: 267 - protein, 17 aa, Artificial Sequence
  synthetic peptide
LIALSIDSVEDHLAWSK

SEQ ID NO: 268 - protein, 19 aa, Artificial Sequence
  synthetic peptide
LIDWGLAEFYHPGQEYNVR

SEQ ID NO: 269 - protein, 26 aa, Artificial Sequence
  synthetic peptide
LIENVDPEKAVQLYQQTANVFENEER

SEQ ID NO: 270 - protein, 8 aa, Artificial Sequence
  synthetic peptide
LIETYFSK

SEQ ID NO: 271 - protein, 18 aa, Artificial Sequence
  synthetic peptide
LIIWDSYTTNKVHAIPLR

SEQ ID NO: 272 - protein, 26 aa, Artificial Sequence
  synthetic peptide
LILPVGPAGGNQMLEQYDKLQDGSVK

SEQ ID NO: 273 - protein, 10 aa, Artificial Sequence
  synthetic peptide
LINATLRAGK

SEQ ID NO: 274 - protein, 12 aa, Artificial Sequence
  synthetic peptide
LIVESYEGEKVR

SEQ ID NO: 275 - protein, 18 aa, Artificial Sequence
  synthetic peptide
LIVWDTYTTNKVHAIPLR

SEQ ID NO: 276 - protein, 11 aa, Artificial Sequence
  synthetic peptide
LKELIFQETAR

SEQ ID NO: 277 - protein, 20 aa, Artificial Sequence
  synthetic peptide
LKPGLEKDFLPLYFGWFLTK

SEQ ID NO: 278 - protein, 14 aa, Artificial Sequence
  synthetic peptide
LKPGYLEATVDWFR

SEQ ID NO: 279 - protein, 18 aa, Artificial Sequence
  synthetic peptide
LKTQPTDEEMLFIYSHFK

SEQ ID NO: 280 - protein, 16 aa, Artificial Sequence
  synthetic peptide
LKVPPAINQFTQALDR

SEQ ID NO: 281 - protein, 11 aa, Artificial Sequence
  synthetic peptide
LLADPTGAFGK

SEQ ID NO: 282 - protein, 15 aa, Artificial Sequence
  synthetic peptide
LLAVQRLEMWLQNPK

SEQ ID NO: 283 - protein, 9 aa, Artificial Sequence
  synthetic peptide
LLCGLLSDR

SEQ ID NO: 284 - protein, 29 aa, Artificial Sequence
  synthetic peptide
LLEDLVYFVTGGTNSGQDVLEVVFSKPNR

SEQ ID NO: 285 - protein, 9 aa, Artificial Sequence
  synthetic peptide
LLEKLAHCK

SEQ ID NO: 286 - protein, 10 aa, Artificial Sequence
  synthetic peptide
LLEPVLLLGK

SEQ ID NO: 287 - protein, 21 aa, Artificial Sequence
  synthetic peptide
LLEVVDDMLAHDIAQLMVLVR

SEQ ID NO: 288 - protein, 19 aa, Artificial Sequence
  synthetic peptide
LLGNQATFSPIVTVEPRRR

SEQ ID NO: 289 - protein, 11 aa, Artificial Sequence
  synthetic peptide
LLIIGDSGVGK

SEQ ID NO: 290 - protein, 17 aa, Artificial Sequence
  synthetic peptide
LLIVSNPVDILTYVAWK

SEQ ID NO: 291 - protein, 13 aa, Artificial Sequence
  synthetic peptide
LLIYSFAGEYVPR

SEQ ID NO: 292 - protein, 9 aa, Artificial Sequence
  synthetic peptide
LLKHPNIVR

SEQ ID NO: 293 - protein, 11 aa, Artificial Sequence
  synthetic peptide
LLLIGDSGVGK

SEQ ID NO: 294 - protein, 10 aa, Artificial Sequence
  synthetic peptide
LLLNNDNLLR

SEQ ID NO: 295 - protein, 29 aa, Artificial Sequence
  synthetic peptide
LLLNNDNLLREGAAHAFAQYNMDQFTPVK

SEQ ID NO: 296 - protein, 19 aa, Artificial Sequence
  synthetic peptide
LLLPEDPLISGLLNSQALK

SEQ ID NO: 297 - protein, 24 aa, Artificial Sequence
  synthetic peptide
LLSDGMLVEAREASEEDLLVVHTR

SEQ ID NO: 298 - protein, 17 aa, Artificial Sequence
  synthetic peptide
LLYDLADQLHAAVGASR

SEQ ID NO: 299 - protein, 18 aa, Artificial Sequence
  synthetic peptide
LMQEREQDIKDHDMMLEK

SEQ ID NO: 300 - protein, 27 aa, Artificial Sequence
  synthetic peptide
LNEIVDAANAVISHIDQTALAVYIAMK

SEQ ID NO: 301 - protein, 12 aa, Artificial Sequence
  synthetic peptide
LNLEEFQQLYVK

SEQ ID NO: 302 - protein, 34 aa, Artificial Sequence
  synthetic peptide
LNRATEGILFFNLELSQMAAPAFEPGRQSDLLVK

SEQ ID NO: 303 - protein, 25 aa, Artificial Sequence
  synthetic peptide
LPFPIIDDKGRDLAILLGMLDPVEK

SEQ ID NO: 304 - protein, 14 aa, Artificial Sequence
  synthetic peptide
LPLEILEFVQEAMK

SEQ ID NO: 305 - protein, 21 aa, Artificial Sequence
  synthetic peptide
LPPPPDCPTSLHQLMLDCWQK

SEQ ID NO: 306 - protein, 13 aa, Artificial Sequence
  synthetic peptide
LQALDTGWNELHK

SEQ ID NO: 307 - protein, 33 aa, Artificial Sequence
  synthetic peptide
LQEEELLATHVDMRAAQVAQDEEIARLLMAEEK

SEQ ID NO: 308 - protein, 13 aa, Artificial Sequence
  synthetic peptide
LQEVIETLLSLEK

SEQ ID NO: 309 - protein, 36 aa, Artificial Sequence
  synthetic peptide
LQIAACSNQDPLQGTTGLIPLLGIDVWEHAYYLQYK

SEQ ID NO: 310 - protein, 11 aa, Artificial Sequence
  synthetic peptide
LQIWDTAGQER

SEQ ID NO: 311 - protein, 11 aa, Artificial Sequence
  synthetic peptide
LQNKNSFLEQK

SEQ ID NO: 312 - protein, 24 aa, Artificial Sequence
  synthetic peptide
LQSPDMGGNESSIYLTNLRLRVPK

SEQ ID NO: 313 - protein, 13 aa, Artificial Sequence
  synthetic peptide
LQVIIIGSRGVGK

SEQ ID NO: 314 - protein, 38 aa, Artificial Sequence
  synthetic peptide
LQYSLDYDFQNNQLLVGIIQAAELPALDMGGTSDPYVK

SEQ ID NO: 315 - protein, 20 aa, Artificial Sequence
  synthetic peptide
LREDEGTWVQVSLLHFVPTR

SEQ ID NO: 316 - protein, 8 aa, Artificial Sequence
  synthetic peptide
LSILSEER

SEQ ID NO: 317 - protein, 11 aa, Artificial Sequence
  synthetic peptide
LSISALFVTPK

SEQ ID NO: 318 - protein, 9 aa, Artificial Sequence
  synthetic peptide
LSNIFVIGK

SEQ ID NO: 319 - protein, 23 aa, Artificial Sequence
  synthetic peptide
LTQDQDVDVKYFAQEALTVLSLA

SEQ ID NO: 320 - protein, 12 aa, Artificial Sequence
  synthetic peptide
LTQYIDGQGRPR

SEQ ID NO: 321 - protein, 17 aa, Artificial Sequence
  synthetic peptide
LTVSWLKDDEPLYIGNR

SEQ ID NO: 322 - protein, 23 aa, Artificial Sequence
  synthetic peptide
LVALLDTLDRWIDETPPVDQPSR

SEQ ID NO: 323 - protein, 20 aa, Artificial Sequence
  synthetic peptide
LVDQALLTMDTYLGQFPDIK

SEQ ID NO: 324 - protein, 8 aa, Artificial Sequence
  synthetic peptide
LVDVICEK

SEQ ID NO: 325 - protein, 11 aa, Artificial Sequence
  synthetic peptide
LVLVGDGGTGK

SEQ ID NO: 326 - protein, 29 aa, Artificial Sequence
  synthetic peptide
LVNQEVLADPLVPPQLTIKDFYMTDSISR

SEQ ID NO: 327 - protein, 11 aa, Artificial Sequence
  synthetic peptide
LVVLGSGGVGK

SEQ ID NO: 328 - protein, 13 aa, Artificial Sequence
  synthetic peptide
LWGDSGIQECFNR

SEQ ID NO: 329 - protein, 7 aa, Artificial Sequence
  synthetic peptide
LYGAQIK

SEQ ID NO: 330 - protein, 20 aa, Artificial Sequence
  synthetic peptide
LYNNITFEELGALLEIPAAK

SEQ ID NO: 331 - protein, 6 aa, Artificial Sequence
  synthetic peptide
LYQQIK

SEQ ID NO: 332 - protein, 32 aa, Artificial Sequence
  synthetic peptide
LYQVEYAMEAIGHAGTCLGILANDGVLLAAER

SEQ ID NO: 333 - protein, 18 aa, Artificial Sequence
  synthetic peptide
MASTFIGNSTAIQELFKR

SEQ ID NO: 334 - protein, 10 aa, Artificial Sequence
  synthetic peptide
MATDPENIIK

SEQ ID NO: 335 - protein, 26 aa, Artificial Sequence
  synthetic peptide
MATVLREPGGGLRLLRFLCSELQAAR

SEQ ID NO: 336 - protein, 16 aa, Artificial Sequence
  synthetic peptide
MDENQFVAVTSTNAAK

SEQ ID NO: 337 - protein, 25 aa, Artificial Sequence
  synthetic peptide
MDMSLEDIIKLNKMQQGHRDRPDSR

SEQ ID NO: 338 - protein, 20 aa, Artificial Sequence
  synthetic peptide
MELLHSLLPQGPDRWESLSK

SEQ ID NO: 339 - protein, 9 aa, Artificial Sequence
  synthetic peptide
MFASFPTTK

SEQ ID NO: 340 - protein, 34 aa, Artificial Sequence
  synthetic peptide
MGGSGQTLVMPLTSPVQDPKTCSGGSAVLCRDVK

SEQ ID NO: 341 - protein, 10 aa, Artificial Sequence
  synthetic peptide
MGHAHSGMGK

SEQ ID NO: 342 - protein, 25 aa, Artificial Sequence
  synthetic peptide
MGKMAAAVASLATLAAEPREDAFRK

SEQ ID NO: 343 - protein, 24 aa, Artificial Sequence
  synthetic peptide
MKLLLGIALFAYAASVWGNFVNMR

SEQ ID NO: 344 - protein, 27 aa, Artificial Sequence
  synthetic peptide
MLEMGITGPEGHVLSRPEELEAEAVFR

SEQ ID NO: 345 - protein, 30 aa, Artificial Sequence
  synthetic peptide
MLGEAVRDGGQHARDPVGGSVEFQFVPVLK

SEQ ID NO: 346 - protein, 18 aa, Artificial Sequence
  synthetic peptide
MLLEDELQDAVLLLFANK

SEQ ID NO: 347 - protein, 21 aa, Artificial Sequence
  synthetic peptide
MNPDTSRVLSGTVGARYQCLK

SEQ ID NO: 348 - protein, 8 aa, Artificial Sequence
  synthetic peptide
MPIIPFLL

SEQ ID NO: 349 - protein, 18 aa, Artificial Sequence
  synthetic peptide
MPQYENPWTIPNLLSMTR

SEQ ID NO: 350 - protein, 9 aa, Artificial Sequence
  synthetic peptide
MQEDIEMTK

SEQ ID NO: 351 - protein, 20 aa, Artificial Sequence
  synthetic peptide
MSAAKVQNQNLSGMEWKASR

SEQ ID NO: 352 - protein, 7 aa, Artificial Sequence
  synthetic peptide
MSVIWDK

SEQ ID NO: 353 - protein, 33 aa, Artificial Sequence
  synthetic peptide
MTVIIPGMNSDNERVPIRPRNASDGLLVRWQNK

SEQ ID NO: 354 - protein, 18 aa, Artificial Sequence
  synthetic peptide
MVAAEAESDSVPLSGNVK

SEQ ID NO: 355 - protein, 8 aa, Artificial Sequence
  synthetic peptide
MVCDVVSR

SEQ ID NO: 356 - protein, 14 aa, Artificial Sequence
  synthetic peptide
MVEPQPNLDQPSSR

SEQ ID NO: 357 - protein, 22 aa, Artificial Sequence
  synthetic peptide
MVISNPAATQSDIDFLIEEIER

SEQ ID NO: 358 - protein, 8 aa, Artificial Sequence
  synthetic peptide
MVSADAYK

SEQ ID NO: 359 - protein, 15 aa, Artificial Sequence
  synthetic peptide
NDEVSSLDAFLDLIR

SEQ ID NO: 360 - protein, 24 aa, Artificial Sequence
  synthetic peptide
NIDEHANEDMERMLLGNKCDMDDK

SEQ ID NO: 361 - protein, 31 aa, Artificial Sequence
  synthetic peptide
NIMEAMLQLFRAQLLPKAMVEVEDFVDPNGK

SEQ ID NO: 362 - protein, 25 aa, Artificial Sequence
  synthetic peptide
NKLLSLFYSLVTPMLNPFIYTLRNK

SEQ ID NO: 363 - protein, 17 aa, Artificial Sequence
  synthetic peptide
NLEGYVGFANLPNQVYR

SEQ ID NO: 364 - protein, 20 aa, Artificial Sequence
  synthetic peptide
NLFPENLVQACFQQIQTVTK

SEQ ID NO: 365 - protein, 11 aa, Artificial Sequence
  synthetic peptide
NLNERILRDAR

SEQ ID NO: 366 - protein, 18 aa, Artificial Sequence
  synthetic peptide
NLTETLVGGSGGRQCPRR

SEQ ID NO: 367 - protein, 10 aa, Artificial Sequence
  synthetic peptide
NMQNAEEWFK

SEQ ID NO: 368 - protein, 24 aa, Artificial Sequence
  synthetic peptide
NNASLPLSLRQMNSFQLRCSHCKT

SEQ ID NO: 369 - protein, 34 aa, Artificial Sequence
  synthetic peptide
NNEIGNPVPSLRSMQSQAFRISQNTGPPPIDRQK

SEQ ID NO: 370 - protein, 12 aa, Artificial Sequence
  synthetic peptide
NNEIMELLSAAK

SEQ ID NO: 371 - protein, 22 aa, Artificial Sequence
  synthetic peptide
NNMTASMFDLSMKDKTRSPFAK

SEQ ID NO: 372 - protein, 10 aa, Artificial Sequence
  synthetic peptide
NSEMKSAMHK

SEQ ID NO: 373 - protein, 12 aa, Artificial Sequence
  synthetic peptide
NTLFNLSNFLDK

SEQ ID NO: 374 - protein, 23 aa, Artificial Sequence
  synthetic peptide
PTAEAASFSDMMDVVYVAQMIQK

SEQ ID NO: 375 - protein, 9 aa, Artificial Sequence
  synthetic peptide
QAGAPQATR

SEQ ID NO: 376 - protein, 5 aa, Artificial Sequence
  synthetic peptide
QAHIK

SEQ ID NO: 377 - protein, 11 aa, Artificial Sequence
  synthetic peptide
QASISGPAPTK

SEQ ID NO: 378 - protein, 10 aa, Artificial Sequence
  synthetic peptide
QASQAGPGPR

SEQ ID NO: 379 - protein, 14 aa, Artificial Sequence
  synthetic peptide
QELSNFVGDWPVDK

SEQ ID NO: 380 - protein, 12 aa, Artificial Sequence
  synthetic peptide
QFGIVTIGEEKK

SEQ ID NO: 381 - protein, 14 aa, Artificial Sequence
  synthetic peptide
QFLSETEKLSPEDR

SEQ ID NO: 382 - protein, 10 aa, Artificial Sequence
  synthetic peptide
QGFVPAAYVK

SEQ ID NO: 383 - protein, 15 aa, Artificial Sequence
  synthetic peptide
QGPPQKPPGPAGPTR

SEQ ID NO: 384 - protein, 8 aa, Artificial Sequence
  synthetic peptide
QHAFSMAR

SEQ ID NO: 385 - protein, 13 aa, Artificial Sequence
  synthetic peptide
QIEELKGQEVSPK

SEQ ID NO: 386 - protein, 8 aa, Artificial Sequence
  synthetic peptide
QIGDKDQK

SEQ ID NO: 387 - protein, 11 aa, Artificial Sequence
  synthetic peptide
QITINDLPVGR

SEQ ID NO: 388 - protein, 10 aa, Artificial Sequence
  synthetic peptide
QITLLECVGK

SEQ ID NO: 389 - protein, 11 aa, Artificial Sequence
  synthetic peptide
QITLNDLPVGR

SEQ ID NO: 390 - protein, 19 aa, Artificial Sequence
  synthetic peptide
QIWQNLGLDEARILPGNMK

SEQ ID NO: 391 - protein, 6 aa, Artificial Sequence
  synthetic peptide
QKEIIK

SEQ ID NO: 392 - protein, 10 aa, Artificial Sequence
  synthetic peptide
QLITDLVISK

SEQ ID NO: 393 - protein, 8 aa, Artificial Sequence
  synthetic peptide
QLIVGVNK

SEQ ID NO: 394 - protein, 27 aa, Artificial Sequence
  synthetic peptide
QLLLTADDRVNPCIGGVILFHETLYQK

SEQ ID NO: 395 - protein, 28 aa, Artificial Sequence
  synthetic peptide
QLQELEDKQNADISAMQDTINKLENELR

SEQ ID NO: 396 - protein, 10 aa, Artificial Sequence
  synthetic peptide
QMEQISQFLK

SEQ ID NO: 397 - protein, 16 aa, Artificial Sequence
  synthetic peptide
QNFIDPLQNLHDKDLR

SEQ ID NO: 398 - protein, 17 aa, Artificial Sequence
  synthetic peptide
QQDAQEFFLHLINMVER

SEQ ID NO: 399 - protein, 14 aa, Artificial Sequence
  synthetic peptide
QQVETCLWASSPTK

SEQ ID NO: 400 - protein, 20 aa, Artificial Sequence
  synthetic peptide
QRMQHILTPNQNTRGQAESK

SEQ ID NO: 401 - protein, 9 aa, Artificial Sequence
  synthetic peptide
QRSRTGQGK

SEQ ID NO: 402 - protein, 15 aa, Artificial Sequence
  synthetic peptide
QRVTGKQSDLSDLSR

SEQ ID NO: 403 - protein, 9 aa, Artificial Sequence
  synthetic peptide
QTVAVGVIK

SEQ ID NO: 404 - protein, 15 aa, Artificial Sequence
  synthetic peptide
QVEELYQSLLELGEK

SEQ ID NO: 405 - protein, 10 aa, Artificial Sequence
  synthetic peptide
QVGEAVATLK

SEQ ID NO: 406 - protein, 9 aa, Artificial Sequence
  synthetic peptide
QVLFSADDR

SEQ ID NO: 407 - protein, 9 aa, Artificial Sequence
  synthetic peptide
RALENTAIK

SEQ ID NO: 408 - protein, 9 aa, Artificial Sequence
  synthetic peptide
RCPITLVER

SEQ ID NO: 409 - protein, 7 aa, Artificial Sequence
  synthetic peptide
RGILTLK

SEQ ID NO: 410 - protein, 29 aa, Artificial Sequence
  synthetic peptide
RIPRRGEIGLTSEEIASFECSGYVMSGSR

SEQ ID NO: 411 - protein, 15 aa, Artificial Sequence
  synthetic peptide
RLPLEILEFVQEAMK

SEQ ID NO: 412 - protein, 30 aa, Artificial Sequence
  synthetic peptide
RNELFLDVLESVNLLMSPQGQVLSAHVSGR

SEQ ID NO: 413 - protein, 11 aa, Artificial Sequence
  synthetic peptide
RPPGVLHCTTK

SEQ ID NO: 414 - protein, 12 aa, Artificial Sequence
  synthetic peptide
RQRIVDTIDIVR

SEQ ID NO: 415 - protein, 11 aa, Artificial Sequence
  synthetic peptide
RRNQYQSSSPK

SEQ ID NO: 416 - protein, 24 aa, Artificial Sequence
  synthetic peptide
RSGAMLQPPSLHAVTSQQQLLQMK

SEQ ID NO: 417 - protein, 24 aa, Artificial Sequence
  synthetic peptide
RSRRQLPPVPPKPRPLLSYSSLMR

SEQ ID NO: 418 - protein, 25 aa, Artificial Sequence
  synthetic peptide
RTDLRRISLDTPDFTDIVLQVGDIR

SEQ ID NO: 419 - protein, 10 aa, Artificial Sequence
  synthetic peptide
SAERLFVLIK

SEQ ID NO: 420 - protein, 11 aa, Artificial Sequence
  synthetic peptide
SFEALLADLTR

SEQ ID NO: 421 - protein, 19 aa, Artificial Sequence
  synthetic peptide
SFECQHCGSAFRYKSQLSK

SEQ ID NO: 422 - protein, 14 aa, Artificial Sequence
  synthetic peptide
SFFSEIISSISDVK

SEQ ID NO: 423 - protein, 10 aa, Artificial Sequence
  synthetic peptide
SFRPDFVLIR

SEQ ID NO: 424 - protein, 22 aa, Artificial Sequence
  synthetic peptide
SGETEDTFIADLVVGLCTGQIK

SEQ ID NO: 425 - protein, 24 aa, Artificial Sequence
  synthetic peptide
SGFLASLDPRRVQWGAAWYAMHSR

SEQ ID NO: 426 - protein, 33 aa, Artificial Sequence
  synthetic peptide
SGTGNQAMWGCALPTWIITCIYLQLLLFNPLVK

SEQ ID NO: 427 - protein, 30 aa, Artificial Sequence
  synthetic peptide
SHLVQAQQDTIQNQTTTMLALGANLMNQTK

SEQ ID NO: 428 - protein, 24 aa, Artificial Sequence
  synthetic peptide
SICTTVLELLDKYLIANATNPESK

SEQ ID NO: 429 - protein, 14 aa, Artificial Sequence
  synthetic peptide
SIEEACLTLQHLNR

SEQ ID NO: 430 - protein, 11 aa, Artificial Sequence
  synthetic peptide
SINEILNIRTK

SEQ ID NO: 431 - protein, 29 aa, Artificial Sequence
  synthetic peptide
SITDIINIGIGGSDLGPLMVTEALKPYSK

SEQ ID NO: 432 - protein, 14 aa, Artificial Sequence
  synthetic peptide
SKINVNEIFYDLVR

SEQ ID NO: 433 - protein, 8 aa, Artificial Sequence
  synthetic peptide
SLDLVTMK

SEQ ID NO: 434 - protein, 10 aa, Artificial Sequence
  synthetic peptide
SLKPDFVLIR

SEQ ID NO: 435 - protein, 25 aa, Artificial Sequence
  synthetic peptide
SLLSDPTYRELIEQLQNKPSDLGTK

SEQ ID NO: 436 - protein, 20 aa, Artificial Sequence
  synthetic peptide
SLMQLESRWRQHFLDSMQPK

SEQ ID NO: 437 - protein, 12 aa, Artificial Sequence
  synthetic peptide
SLNLDSIIAEVK

SEQ ID NO: 438 - protein, 18 aa, Artificial Sequence
  synthetic peptide
SLPASLVEPDFVMTDFAK

SEQ ID NO: 439 - protein, 16 aa, Artificial Sequence
  synthetic peptide
SLSQQIENIRSPQSSR

SEQ ID NO: 440 - protein, 22 aa, Artificial Sequence
  synthetic peptide
SNAHYNLQNAFNLAEQHLGLTK

SEQ ID NO: 441 - protein, 26 aa, Artificial Sequence
  synthetic peptide
SPINVESLLDGLNSLVLDLDFPALRK

SEQ ID NO: 442 - protein, 27 aa, Artificial Sequence
  synthetic peptide
SPQLHTPMYLFLSHLAFVDIGYSSSVT

SEQ ID NO: 443 - protein, 24 aa, Artificial Sequence
  synthetic peptide
SQALEVLSNLMPAERIPPASRIPR

SEQ ID NO: 444 - protein, 17 aa, Artificial Sequence
  synthetic peptide
SQHGRTQDENPVVHFFK

SEQ ID NO: 445 - protein, 27 aa, Artificial Sequence
  synthetic peptide
SQLQSVLLCGIETQACILNTALDLLHR

SEQ ID NO: 446 - protein, 31 aa, Artificial Sequence
  synthetic peptide
SSWVMTCAYAPSGNYVACGGLDNICSIYNLK

SEQ ID NO: 447 - protein, 19 aa, Artificial Sequence
  synthetic peptide
STAISLFYELSENDLNFIK

SEQ ID NO: 448 - protein, 17 aa, Artificial Sequence
  synthetic peptide
STGEAFVQFASQEIAEK

SEQ ID NO: 449 - protein, 23 aa, Artificial Sequence
  synthetic peptide
STLINSLFLTDLYSPEYPGPSHR

SEQ ID NO: 450 - protein, 9 aa, Artificial Sequence
  synthetic peptide
STLVNTLFK

SEQ ID NO: 451 - protein, 29 aa, Artificial Sequence
  synthetic peptide
SYSSSSGSLMPSLENLDLSQVAAISNDLK

SEQ ID NO: 452 - protein, 8 aa, Artificial Sequence
  synthetic peptide
TAVAPIER

SEQ ID NO: 453 - protein, 29 aa, Artificial Sequence
  synthetic peptide
TDEHVIDQGDDGDNFYVIERGTYDILVTK

SEQ ID NO: 454 - protein, 23 aa, Artificial Sequence
  synthetic peptide
TDLFSSSCPGGIMLKETGQGYQR

SEQ ID NO: 455 - protein, 16 aa, Artificial Sequence
  synthetic peptide
TFVSITPAEVGVLVGK

SEQ ID NO: 456 - protein, 26 aa, Artificial Sequence
  synthetic peptide
TGVPVGHWPIPESFWPEQNLPSLPPR

SEQ ID NO: 457 - protein, 14 aa, Artificial Sequence
  synthetic peptide
THLPGFVEQAGALK

SEQ ID NO: 458 - protein, 16 aa, Artificial Sequence
  synthetic peptide
TIDWVSFVEIMPPNQK

SEQ ID NO: 459 - protein, 11 aa, Artificial Sequence
  synthetic peptide
TKGSGNAVSIK

SEQ ID NO: 460 - protein, 17 aa, Artificial Sequence
  synthetic peptide
TLASLSPETSLFIIASK

SEQ ID NO: 461 - protein, 21 aa, Artificial Sequence
  synthetic peptide
TLESVDPLGGLNTIDILTAIR

SEQ ID NO: 462 - protein, 23 aa, Artificial Sequence
  synthetic peptide
TLTAVHDAILEDLVFPSEIVGKR

SEQ ID NO: 463 - protein, 25 aa, Artificial Sequence
  synthetic peptide
TLTIVDTGIGMTKADLINNLGTIAK

SEQ ID NO: 464 - protein, 8 aa, Artificial Sequence
  synthetic peptide
TLVLLMGK

SEQ ID NO: 465 - protein, 18 aa, Artificial Sequence
  synthetic peptide
TNTGSAMLEQIAMSDRYK

SEQ ID NO: 466 - protein, 8 aa, Artificial Sequence
  synthetic peptide
TPPPSQGK

SEQ ID NO: 467 - protein, 30 aa, Artificial Sequence
  synthetic peptide
TPPWQSQQPHHAALIPSPLIPRPSDRCRQR

SEQ ID NO: 468 - protein, 16 aa, Artificial Sequence
  synthetic peptide
TPSALAILENANVLAR

SEQ ID NO: 469 - protein, 16 aa, Artificial Sequence
  synthetic peptide
TQAPGQGPPVNIQFLR

SEQ ID NO: 470 - protein, 24 aa, Artificial Sequence
  synthetic peptide
TQARQMFEGEMASLEALRNTGLVR

SEQ ID NO: 471 - protein, 12 aa, Artificial Sequence
  synthetic peptide
TQDENPVVHFFK

SEQ ID NO: 472 - protein, 28 aa, Artificial Sequence
  synthetic peptide
TQKPGESGINIVTADFVELGDFISTVIK

SEQ ID NO: 473 - protein, 31 aa, Artificial Sequence
  synthetic peptide
TRGSPRVEAAAAYCRQLCQVSPSPSAGLGGR

SEQ ID NO: 474 - protein, 24 aa, Artificial Sequence
  synthetic peptide
TRPLDIHDCFHFMLRVLQELKVDN

SEQ ID NO: 475 - protein, 8 aa, Artificial Sequence
  synthetic peptide
TSVSGNWK

SEQ ID NO: 476 - protein, 17 aa, Artificial Sequence
  synthetic peptide
TVDWALAEYMAFGSLLK

SEQ ID NO: 477 - protein, 11 aa, Artificial Sequence
  synthetic peptide
TVRGRGSGTPR

SEQ ID NO: 478 - protein, 16 aa, Artificial Sequence
  synthetic peptide
TYFPHFDVSHGSAQVK

SEQ ID NO: 479 - protein, 35 aa, Artificial Sequence
  synthetic peptide
VAAGVLCELAQDKEAAEAIEAEGATAPLTELLHSR

SEQ ID NO: 480 - protein, 29 aa, Artificial Sequence
  synthetic peptide
VADALANAAGHLDDLPGALSALSDLHAHK

SEQ ID NO: 481 - protein, 19 aa, Artificial Sequence
  synthetic peptide
VASNPYTWFTMEALEETWR

SEQ ID NO: 482 - protein, 27 aa, Artificial Sequence
  synthetic peptide
VATGVDINMRVGVHSGSVLCGVIGLQK

SEQ ID NO: 483 - protein, 9 aa, Artificial Sequence
  synthetic peptide
VAVVNQIAR

SEQ ID NO: 484 - protein, 7 aa, Artificial Sequence
  synthetic peptide
VDPVNFK

SEQ ID NO: 485 - protein, 21 aa, Artificial Sequence
  synthetic peptide
VEEVPQRMTRNRAQMLASQSK

SEQ ID NO: 486 - protein, 19 aa, Artificial Sequence
  synthetic peptide
VELVPPTPAEIPTAIQSVK

SEQ ID NO: 487 - protein, 24 aa, Artificial Sequence
  synthetic peptide
VETGILRPGMVVTFAPVNITTEVK

SEQ ID NO: 488 - protein, 11 aa, Artificial Sequence
  synthetic peptide
VFIPHGLIMDR

SEQ ID NO: 489 - protein, 25 aa, Artificial Sequence
  synthetic peptide
VFQSNANYAENFIQSIVSTVEPALR

SEQ ID NO: 490 - protein, 9 aa, Artificial Sequence
  synthetic peptide
VGFYVNTFK

SEQ ID NO: 491 - protein, 20 aa, Artificial Sequence
  synthetic peptide
VGFYVNTFQSIAGLEENFHK

SEQ ID NO: 492 - protein, 24 aa, Artificial Sequence
  synthetic peptide
VGFYVNTFQSIAGLEENFHKEMSK

SEQ ID NO: 493 - protein, 12 aa, Artificial Sequence
  synthetic peptide
VGGSARSGVYTK

SEQ ID NO: 494 - protein, 21 aa, Artificial Sequence
  synthetic peptide
VHAELADVLTEAVVDSILAIR

SEQ ID NO: 495 - protein, 9 aa, Artificial Sequence
  synthetic peptide
VHELEQQNK

SEQ ID NO: 496 - protein, 19 aa, Artificial Sequence
  synthetic peptide
VHELEQQNKVLEAELLVLR

SEQ ID NO: 497 - protein, 24 aa, Artificial Sequence
  synthetic peptide
VHTVEDYQAIVDAEWNILYDKLEK

SEQ ID NO: 498 - protein, 12 aa, Artificial Sequence
  synthetic peptide
VIGSGCNLDSAR

SEQ ID NO: 499 - protein, 20 aa, Artificial Sequence
  synthetic peptide
VKVDNQHDFQDIASVVALTK

SEQ ID NO: 500 - protein, 10 aa, Artificial Sequence
  synthetic peptide
VLAGQEYAAK

SEQ ID NO: 501 - protein, 10 aa, Artificial Sequence
  synthetic peptide
VLEAELLVLR

SEQ ID NO: 502 - protein, 27 aa, Artificial Sequence
  synthetic peptide
VLELDNVKSEIIPMFSNLASDEQDSVR

SEQ ID NO: 503 - protein, 14 aa, Artificial Sequence
  synthetic peptide
VLLVIDEPHTDWAK

SEQ ID NO: 504 - protein, 11 aa, Artificial Sequence
  synthetic peptide
VLPSITTEILK

SEQ ID NO: 505 - protein, 15 aa, Artificial Sequence
  synthetic peptide
VLQPVEGEVAILFKK

SEQ ID NO: 506 - protein, 11 aa, Artificial Sequence
  synthetic peptide
VLVLDDTNHER

SEQ ID NO: 507 - protein, 19 aa, Artificial Sequence
  synthetic peptide
VNDTVQISLDSGKITDAIK

SEQ ID NO: 508 - protein, 23 aa, Artificial Sequence
  synthetic peptide
VNKQDLGQSLLDMAYGHLGVTEK

SEQ ID NO: 509 - protein, 24 aa, Artificial Sequence
  synthetic peptide
VNPTEVEKNNSVTMTCRVNSSNPK

SEQ ID NO: 510 - protein, 15 aa, Artificial Sequence
  synthetic peptide
VNQIGSVTESIQACK

SEQ ID NO: 511 - protein, 27 aa, Artificial Sequence
  synthetic peptide
VNSEQEHFLIVPFGLLYSEVTASSLVK

SEQ ID NO: 512 - protein, 19 aa, Artificial Sequence
  synthetic peptide
VPSTEAEALASSLMGLFEK

SEQ ID NO: 513 - protein, 24 aa, Artificial Sequence
  synthetic peptide
VQCCLYFIAPSGHGLKPLDIEFMK

SEQ ID NO: 514 - protein, 12 aa, Artificial Sequence
  synthetic peptide
VQSLQDEVAFLR

SEQ ID NO: 515 - protein, 21 aa, Artificial Sequence
  synthetic peptide
VQVVVTVLDYDKIGKNDAIGK

SEQ ID NO: 516 - protein, 23 aa, Artificial Sequence
  synthetic peptide
VSNEEVTEELLHVNDDLNNVFLR

SEQ ID NO: 517 - protein, 23 aa, Artificial Sequence
  synthetic peptide
VTAEAASFSDMMDVVYVAQMIQK

SEQ ID NO: 518 - protein, 19 aa, Artificial Sequence
  synthetic peptide
VTEQLIEAISNGDFESYTK

SEQ ID NO: 519 - protein, 20 aa, Artificial Sequence
  synthetic peptide
VTRHWASLSNLVASLLNSMK

SEQ ID NO: 520 - protein, 14 aa, Artificial Sequence
  synthetic peptide
VTSLTACLVNQNLR

SEQ ID NO: 521 - protein, 26 aa, Artificial Sequence
  synthetic peptide
VVCGMLGFPSQTSVNSHYYRKVWNLK

SEQ ID NO: 522 - protein, 20 aa, Artificial Sequence
  synthetic peptide
VVDSLQLTGTKPVATPVDWK

SEQ ID NO: 523 - protein, 28 aa, Artificial Sequence
  synthetic peptide
VVELLADIVQNSSLEDSQIEKERDVILR

SEQ ID NO: 524 - protein, 10 aa, Artificial Sequence
  synthetic peptide
VVFIFGPDKK

SEQ ID NO: 525 - protein, 20 aa, Artificial Sequence
  synthetic peptide
VVLPMPILVLPPIVMSMLEK

SEQ ID NO: 526 - protein, 10 aa, Artificial Sequence
  synthetic peptide
VVNIIPVIAK

SEQ ID NO: 527 - protein, 33 aa, Artificial Sequence
  synthetic peptide
VYFQETLTFLSTEIMPPLQGWNSISASLLPAPR

SEQ ID NO: 528 - protein, 24 aa, Artificial Sequence
  synthetic peptide
WCGPLPAIRLQHLGEVIHIFSHIK

SEQ ID NO: 529 - protein, 32 aa, Artificial Sequence
  synthetic peptide
WEEQTSEQVLRLHLAIGDIVPLQTLWMENTVK

SEQ ID NO: 530 - protein, 32 aa, Artificial Sequence
  synthetic peptide
WIHCFEDVTAIIFCVALSGYDQVLHEDETTNR

SEQ ID NO: 531 - protein, 11 aa, Artificial Sequence
  synthetic peptide
WLLGLLNVQGK

SEQ ID NO: 532 - protein, 7 aa, Artificial Sequence
  synthetic peptide
WMLSLTK

SEQ ID NO: 533 - protein, 23 aa, Artificial Sequence
  synthetic peptide
WMMTSQPKITGFSSANVLQIILK

SEQ ID NO: 534 - protein, 19 aa, Artificial Sequence
  synthetic peptide
YADDSFTPAFVSTVGIDFK

SEQ ID NO: 535 - protein, 12 aa, Artificial Sequence
  synthetic peptide
YFPTQALNFAFK

SEQ ID NO: 536 - protein, 6 aa, Artificial Sequence
  synthetic peptide
YHDGTK

SEQ ID NO: 537 - protein, 10 aa, Artificial Sequence
  synthetic peptide
YLAEVATGEK

SEQ ID NO: 538 - protein, 12 aa, Artificial Sequence
  synthetic peptide
YLATASTMDHAR

SEQ ID NO: 539 - protein, 12 aa, Artificial Sequence
  synthetic peptide
YLKEYQDLLNVK

SEQ ID NO: 540 - protein, 21 aa, Artificial Sequence
  synthetic peptide
YSGSSLSNMGAYSRSLPRLYK

SEQ ID NO: 541 - protein, 25 aa, Artificial Sequence
  synthetic peptide
YVEPIEDVPCGNIVGLVGVDQFLVK

SEQ ID NO: 542 - protein, 25 aa, Artificial Sequence
  synthetic peptide
YVWAATAGGVFQSITPVEIDMIVGK

SEQ ID NO: 543 - protein, 22 aa, Artificial Sequence
  synthetic peptide
YVWLVYEQEQPLSCDEPILSNK

SEQ ID NO: 544 - protein, 13 aa, Artificial Sequence
  synthetic peptide
EMLSSTTYPVVVK

SEQ ID NO: 545 - protein, 712 aa, mus musculus
DEIEEIKETLIDWCDEKELNLILTTGGTGFAPRDVTPEATKEVIEREAPGMALAMLMGSLNVTPLGMLSRPVCGIRGKTLIINLPGSKKGSQECFQFILPALPHAIDLLRDAIVKVKEVHDELEDLPSPPPPLSPPPTTSPHKQTEDKGVQCEEEEEEKKDSGVASTEDSSSSHITAAALAAKKHPFYTSPALFMANHGQPIPGLISYSHHATGSADKRIPDSIISRGVQVLPRDTASLSTTPSESPRAQATSRLSTASCPTPKVQSRCSSKENILRASHSAVDITKVARRHRMSPFPLTSMDKAFITVLEMTPVLGTEIINYRDGMGRVLAQDVYAKDNLPPFPASVKDGYAVRAADGPGDRFIIGESQAGEQPTQTVMPGQVMRVTTGAPIPCGADAVVQVEDTELIRESDDGTEELEVRILVQARPGQDIRPIGHDIKRGECVLAKGTHMGPSEIGLLATVGVTEVEVNKFPVVAVMSTGNELLNPEDDLLPGKIRDSNRSTLLATIQEHGYPTINLGIVGDNPDDLLNALNEGISRADVIITSGGVSMGEKDYLKQVLDIDLHAQIHFGRVFMKPGLPTTFATLDIDGVRKIIFALPGNPVSAVVTCNLFVVPALRKMQGILDPRPTIIKARLSCDVKLDPRPEYHRCILTWHHQEPLPWAQSTGNQMSSRLMSMRSANGLLMLPPKTEQYVELHKGEVVDVMVIGRL

SEQ ID NO: 546 - protein, 509 aa, mus musculus
MLCQPAMLLDGLLLLATMAAAQHRGPEAGGHRQIHQVRRGQCSYTFVVPEPDICQLAPTAAPEVLGGSNSLQRDLPASRLHLTDWRAQRAQRAQRVSQLEKILENNTQWLLKLEQSIKVNLRSHLVQAQQDTIQNQTTTMLALGANLMNQTKAQTHKLTAVEAQVLNQTLHMKTQMLENSLSTNKLERQMLMQSRELQRLQGRNRALETRLQALEAQHQAQLNSLQEKREQLHSLLGHQTGTLANLKHNLHALSSNSSSLQQQQQQLTEFVQRLVRIVAQDQHPVSLKTPKPVFQDCAEIKRSGVNTSGVYTIYETNMTKPLKVFCDMETDGGGWTLIQHREDGSVNFQRTWEEYKEGFGNVAREHWLGNEAVHRLTSRTAYLLRVELHDWEGRQTSIQYENFQLGSERQRYSLSVNDSSSSAGRKNSLAPQGTKFSTKDMDNDNCMCKCAQMLSGGWWFDACGLSNLNGIYYSVHQHLHKINGIRWHYFRGPSYSLHGTRMMLRPMGA

SEQ ID NO: 547 - protein, 281 aa, mus musculus
METMFQETQYPDVLTREVLARSMDGSEAKVQIRFNNRRAKQRAREKKAMLRSTAGAKAPLVLPAGEERNGEDSRDQSSPGLGASAAEWGGVEGPGELGRKEKNGASPSAVDTSGVRGDWTQKGASGSSQKNERRPQNRVPECRWGTEDVHPVPVLVPRAQRRQRVGSRSRGQSVSLKCPRIRPVLVSTVQPVPVLVPHRPLRDGFTEPQLQELEQVFQRNHYLRAEEGKQLARGTGVTEAKLQRWFKKRRVQFRREHSQSRMNDDAPPRTHSTSLKMAQEP

SEQ ID NO: 548 - protein, 246 aa, mus musculus
MTMDKSELVQKAKLAEQAERYDDMAAAMKAVTEQGHELSNEERNLLSVAYKNVVGARRSSWRVISSIEQKTERNEKKQQMGKEYREKIEAELQDICNDVLELLDKYLILNATQAESKVFYLKMKGDYFRYLSEVASGENKQTTVSNSQQAYQEAFEISKKEMQPTHPIRLGLALNFSVFYYEILNSPEKACSLAKTAFDEAIAELDTLNEESYKDSTLIMQLLRDNLTLWTSENQGDEGDAGEGEN

SEQ ID NO: 549 - protein, 438 aa, mus musculus
MEDSFNTTSSASTFTLQSSSETMVSIQLLDFRTSLLEALEELRMRRKAETQYEEQIAKIILETQELKWQKEALQNQKEALIKQHKEAMGVLKNQLQMKMYALEEEKGKYKLATEIKEKEIEGLKETLKTLQVSQYSLQKKVSEMEQKAHLYHLAKEDYHKQLNEIEKYYAAITNQFGLVRENHVKLEQNVQEAIQLNKRLSTLNEKQESEIHSLKKELKKAASELIKSKVTCQHKMEEESIDLIIKEQKYEELQERLNMELEVNKKINEEITHIQEEKQQLLQQETQANTEIDAELKVLRENNQTLERDNELQREKVKENEEKFLSLEKEHERALGTWKKHVEELSGEMNVIKNELSSLRETHAKLQEHYNKLCEQKKTEEYKKFQNVPELNNENSDELTRKKSENIITQKYNSGPEIWGKNTKSFCLDTEYREEEKK

SEQ ID NO: 550 - protein, 670 aa, mus musculus
MNYLRRRLSDSNFMANLPNGYMTDLQRPQPPPPPPSAASPGATPGSATASAERASTAAPVASPAAPSPGSSGGGGFFSSLSNAVKQTTAAAAATFSEQVGGGSGGAGRGGAAARVLLVIDEPHTDWAKYFKGKKIHGEIDIKVEQAEFSDLNLVAHANGGFSVDMEVLRNGVKVVRSLKPDFVLIRQHAFSMARNGDYRSLVIGLQYAGIPSVNSLHSVYNFCDKPWVFAQMVRLHKKLGTEEFPLIDQTFYPNHKEMLSSTTYPVVVKMGHAHSGMGKVKVDNQHDFQDIASVVALTKTYATAEPFIDAKYDVRVQKIGQNYKAYMRTSVSGNWKTNTGSAMLEQIAMSDRYKLWVDTCSEIFGGLDICAVEALHGKDGRDHIIEVVGSSMPLIGDHQDEDKQLIVELVVNKMTQALPRQPQRDASPGRGSHSQSSSPGALTLGRQTSQQPAGPPAQQRPPPQGGPPQPGPGPQRQGPPLQQRPPPQGQQHLSGLGPPAGSPLPQRLPSPTAAPQQSASQATPVTQGQGRQSRPVAGGPGAPPAARPPASPSPQRQAGAPQATRQASISGPAPTKASGAPPGGQQRQGPPQKPPGPAGPTRQASQAGPGPRTGPPTTQQPRPSGPGPAGRPAKPQLAQKPSQDVPPPITAAAGGPPHPQLKASPSQAQP

SEQ ID NO: 551 - protein, 326 aa, mus musculus
MNRSPSWSDQLHAVLSSTDENMARIKQSLYPFRVSSTGDLADTWTSHRLPPQPEAQAQQPWALKTPTLGERLSCTEAHSSSLWDEVTKLRSQLQAQAQVTEALKHSVQSLLKDREQHMFKISALEASLKLLQEGPKGRALLEQCLEGLKKELQGLRSQVQELVQNQMKARPGKLGPASGFHQELQSEHQVLWEESEILREELKLLRDQLSQHQELLLEQIAKGPQVQARSWKKLEHLQSDQMDRVHTLEVSSTEAHDAQKEEPYLLSSEVSLPDCGRSWELLKKLDRELQNNSLPNLEPSSSQFHAWSLGQEDLFLEGPTIFQSDL

SEQ ID NO: 552 - protein, 229 aa, mus musculus
MTSRLRALGGRINNTRTSELPKEKTRSEVICSIRFLDGLVQTFKVNKQDLGQSLLDMAYGHLGVTEKEYFGLQHGDDPVDSPRWLEASKPLRKQLKGGFPCTLHFRVRYFIPDPNTLQQEQTRHLYFLQLKMDVCEGRLTCPLNSAVVLASYAVQSHFGDFNSSIHHPGYLADSQFIPDQNDDFLSKVESLHEQHSGLKQSEAESCYINIARTLDFYGVELHGGRDLHN

SEQ ID NO: 553 - protein, 431 aa, mus musculus
MSVAGLKKQFHKATQKVSEKVGGAEGTKLDDDFKEMERKVDVTSRAVMEIMTKTIEYLQPNPASRAKLSMINTMSKIRGQEKGPGYPQAEALLAEAMLKFGRELGDDCNFGPALGEVGEAMRELSEVKDSLDMEVKQNFIDPLQNLHDKDLREIQHHLKKLEGRRLDFDYKKKRQGKIPDEELRQALEKFDESKEIAESSMFNLLEMDIEQVSQLSALVQAQLEYHKQAVQILQQVTVRLEERIRQASSQPRREYQPKPRMSLEFATGDSTQPNGGLSHTGTPKPPGVQMDQPCCRALYDFEPENEGELGFKEGDIITLTNQIDENCRLLVLVLIPATENLTKTNIVAVSQETPHLRMTILQVNNSKNGVLPGTGVFCLATHVLLERAEVTGQMLQTSGMDLCEEAASRMGRRVEWTSGGRGASTYLFNNG

SEQ ID NO: 554 - protein, 620 aa, mus musculus
MKMDSSLGDDFGPTIQNRAMEQIITPMTVQLCHLLISVERKEVQNKALASLQKVAEQLANASEEFVHVASRLAGDSEEKWLREEMKPVAESLILSGRNILRVAEKLHLQPESQRHWEELVATAQQVLVDTKKVLLLDDAAAVRKTRTAANWCLTCVEALEEAEDTTSLRTSLDDLAAALFRLGGLTARWAWDQHLGRARHRLGCCVPALLAAAHGHLRHPRDPQLVASRRRVFALTRQSLEELLDALQPGVGVVGTGVLSQNGALARGLCKLRKVLEDPGPGHLLLDAPLAAVVWHCLRLAACSAPQERMHLVSRCRQLMQLRPGVHSLPRSSPGTDCEALRAATDALFRAVRAGLLRQILDTFTDTQSPLETLVQAALATSTIRFRCDSEALAETVQILLDAFHNQAKQMIRVAHLVWVCCPQQQTGRDLEAAVAGLQRLVIKVKELFSQSPQTLGLDWSPATLQALLEAWARESEHLLSCFDVVLNIPEFLSVSIQEMTKHLDLSTIALRSGASREFSRSVAFLRGRATHIVQVMSRYVGQDPDPIFRNGMRVVVQQLAQSSVTLGAATEGSRAEDSAQDTDVFLTMAKHLIHAAQQVREGLDGSNHPDILSPLRVQV

SEQ ID NO: 555 - protein, 4630 aa, mus musculus
MTRLRSRLPAAAARPRVPPNSLQHRLTGKIIMSQLLLAILTLSGLLPNAEVLIVGANQDQHLCDPGEFLCHDHVTCVSQSWLCDGDPDCPDQSDESLDTCPEEVEIKCPLNHIACHGSSACVHLSKLCNGVVDCPDGFDEGGHCQELLPSCQQLNCQFKCAMVRNATRCYCEDGFEVAEDGRSCKDQDECSIYGICSQTCKNTYGSYACSCVEGYIMQSDNRSCKVKHEPTDKAPMLLISSLETIELFYINGSKMTTLSSANRNEIHTLDFIYSEEMICWIESRESSNQLKCGQITKAGRLTDQRIINSLQSFQNVEQMAFDWLTRNIYFVDHVSDRIFVCNFNGSVCVTLIESELHNPKAIAADPIAGKLFFTDYGNVPKIERCDLDGMNRTRIVYSKAEQPSALALDLVNRLVYWVDLYLDYVGVVDYQGKNRHTIVQGRQVKHLYGITVFEDYLYATSSDNFNIIRINRFNGTDIHSIIKMESARGIRTYQKRTQPTVRSHACEVDAYGMPGGCSHICLLSSSYKTRTCRCRTGFNMGSDGRSCKRPKNELFLFYGKGRPGIVRGMDLNTKIADECMIPIENLVNPRALDFHAEANYIYFADTTSFLIGRQKIDGTERETILKDDLDNVEGIAVDWIGNNLYWTNDGHRKTINVARLEKASQSRKTLLEGGMSHPRAIVVDPVNGWMYWTDWKEDKIDDSVGRIEKAWMDGVNRQVFVTSKMLWPNGLTLDFHTSTLYWCDAYYDHIEKVFLNGTHRKVVYSGKELNHPFGLSHHGNYVFWTDYMNGSIFQLDLMTNEVTLLRHERAPLFGLQIYDPRKQQGDNMCRINNGGCGTLCLAIPAGRVCACADNQLLDENGTTCTFNPEEIRFHICKPGEFRCKNKHCIQARWKCDGDDDCLDGSDEDSVTCFNHSCPDDQFKCQNNRCIPKRWLCDGANDCGSNEDESNQTCTARTCQADQFSCGNGRCIPTAWLCDREDDCGDQTDEVASCEFPTCEPLTQFICKSGRCISNKWHCDTDDDCGDRSDEVGCVHSCLDDQFRCSSGRCIPGHWACDGDNDCGDFSDETHINCTKEEARSPAGCIGNEFQCRPDGNCIPDLWRCDGEKDCEDGSDEKGCNGTIRLCDHKTKFSCRSTGRCINNAWVCDGDVDCEDQSDEEDCDSFLCGPPKYPCANDTSVCLQPEKLCNGRKDCPDGSDEGDLCDECSLNNGGCSNHCSVVPGRGIVCSCPEGHQLKKDNRTCEIVDYCASHLRCSQVCEQQKHMVKCSCYEGWALGTDGESCTSVDSFEAFIIFSIRHEIRRIDLHKGDYSLLVPGLRNTIALDFHFNQSLLYWTDVVEDRIYRGKLSESGGVSAIEVVVEHGLATPEGLTVDWIAGNIYWIDSNLDQIEVSKLDGSLRATLIAGAMEHPRAIALDPRYGILFWTDWDANFPRIESASMSGAGRKTIYKDMKTGAWPNGLTVDHFERRIVWTDARSDAIYSAFYDGTNMIEIIRGHEYLSHPFAVSLYGSEVYWTDWRTNTLAKANKWTGQNVSVIQKTSAQPFDLQIYHPSRQPQAPNPCAANEGRGPCSHLCLINHNRSAACACPHLMKLSSDKKTCYEMKKFLLYARRSEIRGVDIDNPYVNFITAFTVPDIDDVAVIDFDASEERLYWTDIKTQTITRAFINGTGLETVISRDIQSIRGLAVDWVSRNLYWISSEFDETQINVARLDGSLKTSIIHGIDKPQCLAAHPVRGKLYWTDGNTINMANMDGSNSKILFQNQKEPVGLSIDYVENKLYWISSGNGTINRCNLDGGNLEVIESMKEELTKATALTIMDKKLWWADQNLAQLGTCNKRDGRNPSILRNKTSGVVHMKVYDKEAQQGSNSCQVNNGGCSQLCLPTSETTRTCMCTVGYYLQKNRMSCQGIESFLMYSVHEGIRGIPLEPRDKVDALMPISGAAFAVGIDFHAENDTIYWTDMGLNKISRAKRDQTWKEDVVTNGLGRVEGIAVDWIAGNIYWTDHGFNLIEVARLNGSFRYVIISQGLDQPRSIAVHPEKGFLFWTEWGQVPCIGKARLDGSEKVMIVSVGITWPNGISIDYEENKLYWCDARSDKIERIDLDTGANREVLLSGSNVDLFSVAVFGAYIYWSDRAHANGSVRRGHKNDATETVTMRTGLGVNLKEIKIFNRVREKGTNVCAKENGGCQQLCLYRGNSRRTCACAHGYLAGDGVTCLRHEGYLLYSGRTILKSIHLSDETNLNSPVRPYENPNYFKNIIALAFDYNQRREGTNRIFYSDAHFGNIQLIKDNWEDRQVIVENVGSVEGLAYHRAWDTLYWTSSSTSSITRHTVDQTRPGAIDREAVITMSEDDHPHVLALDECQNLMFWTNWNEQHPSIMRATLTGKNAHVVVSTDILTPNGLTIDHRAEKLYFSDGSLGKIERCEYDGSQRHVIVKSGPGTFLSLAVYDSYIFWSDWGRRAILRSNKYTGGETKILRSDIPHQPMGIIAVANDTNSCELSPCALLNGGCHDLCLLTPDGRVNCSCRGDRVLLANNRCVTKNSSCNIYSEFECGNGDCVDYVLTCDGIPHCKDKSDEKLLYCENRSCRSGFKPCYNRRCVPHGKLCDGTNDCGDSSDELDCKVSTCSTVEFRCADGTCIPRSARCNQNMDCSDASDEKGCNNTDCTHFYKLGVKSTGFIRCNSTSLCVLPSWICDGSNDCGDYSDELKCPVQNKHKCEENYFGCPSGRCILNTWVCDGQKDCEDGLDELHCDSSCSWNQFACSVKKCISKHWICDGEDDCGDSLDESDSICGAVTCAADMFSCQGSHACVPQHWLCDGERDCPDGSDELSSAGCAPNNTCDENAFMCHNKVCIPKQFVCDHDDDCGDGSDEFLQCGYRQCGPEEFRCADGRCLVNTLWQCDGDFDCPDSSDEAPINPRCRSAEHSCNSSFFMCKNGRCIPSDGLCDIRDDCGDGSDETNCHINECLSKKISGCSQDCQDLPVSYKCKCWPGFQLKDDGKTCVDIDECSSGFPCSQQCINTYGTYKCHCAEGYETQPDNPNGCRSLSDEEPFLILADQHEIRKISTDGSNYTLLKQGLNNVIALDFDYREEFIYWIDSSRPNGSRINRMCLNGSDIKVVHNTAVPNALAVDWIGKNLYWSDTEKRIIEVSKLNGLYPTVLVSKRLKFPRDLSLDPRAGNLYWIDCCEYPHIGRVGMDGTNQSVVIETKISRPMALTIDYVNHRLYWADENHIEFSNMDGSHRHKVPNQDIPGVIALTLFEDYIYWTDGKTKSLSRVHKTSGADRLSLINSWHAITDIQVYHSYRQPDVSKHLCTVNNGGCSHLCLLGPGKTHTCACPTNFYLAADNRTCLSNCTASQFRCKTDKCIPFWWKCDTVDDCGDGSDEPDDCPEFKCQPGRFQCGTGLCALPAFICDGENDCGDNSDELNCDTHVCLAGQFKCTKNKKCIPVNLRCNGQDDCGDEEDEKDCPENSCSPDYFQCKTTKHCISKLWVCDEDPDCADASDEANCDKKTCGPHEFQCKNNNCIPDHWRCDNQNDCSDNSDEDNCKPQTCTLKDFLCSNGDCVSSRFWCDGEFDCADGSDEKNCETSCSKDQFQCSNGQCLSAKWKCDGHEDCKYGEDEKNCEPAFPVCSSSEYMCASGGCLSASLKCNGEPDCVDGSDEMDCVIECKEDQFQCKNKAYCIPIRWLCDGIYDCVDGSDEETCGRGGSICRDDEFLCNNSLCKLHFWVCDGEDDCGDNSDEAPDMCVKFLCPPTRPYRCRNDRICLQLEKICNGINDCGDNSDEEHCSGKLSLKSKPCKKDEFTCSNRNCIPMELQCDSLDDCGDGSDEQGCLKTPIEHTCENNGNPCGDDAYCNQIKTSVFCRCKPGFQRNMKGRECADLNECLLFGICSHHCLNTRGSYKCVCDQNFQEKNNSCIAKGSEDQALYIANDTDILGFVYPFNYSGGHQQISHVEHNSRITGMDVHYQRNVIVWSTQFNPGGIFYKMIDAREKRQANSGLICPEFKRPRDIAVDWVAGNVYWTDHSRMHWFSYYTTHWTSLRYSINVGQLNGPNCTRLLTNMAGEPYAIAVNPKRGMMYWTVIGDHSHIEEAAMDGTLRRVLVQKNLQRPTGLTVDHFGERIYWADFELSIIGSVLYDGSSPVVSVSSKQGLLHPHRIDVFEDYIYGAGPKNGIFRVQKFGHGSVEVLALGVDKTKSILVSHRYKQLNLPNPCLDLSCDFLCLLNPSGATCICPEGKYMMNGTCHDDSLLDDSCKLTCENGGRCILNEKGDLRCHCWPSYSGGRCEVNHCSNYCQNGGTCIPSTLGRPTCICALGFTGPNCGKAVCEDSCHNGGSCVVTAGNQPYCHCQADYTGDRCQYYVCHHYCVNSESCTIGNDGSVECVCPTRYEGPKCEIDKCVRCHGGHCIINKDNEDIFCNCTNGKIASSCQLCDGYCYNGGTCQLDPETSIPVCVCSTNWSGTQCERPAPKSSKSEHISTRSIAIIVPLVLLVTLVTTLVIGLVVCKRKRRTKTIRRQPIINGGINVEIGNPSYNMYEVDHDHSDGGLLEPSFMIDPVKSRYIGGGSSAFKLPHTAPPIYLNSDLKGPLTSGPTNYSNPVYAKLYMDGQNCRNSLASVDERKELLPKKIEIGIRETVA

SEQ ID NO: 556 - protein, 561 aa, mus musculus
MASTEGANNMPKQVEVRMHDSHLSSDEPKHRNLGMRMCDKLGKNLLLSLTVFGVILGAVCGGLLRLASPIHPDVVMLIAFPGDILMRMLKMLILPLIISSLITGLSGLDAKASGRLGTRAMVYYMSTTIIAAVLGVILVLAIHPGNPKLKKQLGPGKKNDEVSSLDAFLDLIRNLFPENLVQACFQQIQTVTKKVLVAPPSEEANTTKAVISMLNETMNEAPEETKIVIKKGLEFKDGMNVLGLIGFFIAFGIAMGKMGEQAKLMVEFFNILNEIVMKLVIMIMWYSPLGIACLICGKIIAIKDLEVVARQLGMYMITVIVGLIIHGGIFLPLIYFVVTRKNPFSFFAGIFQAWITALGTASSAGTLPVTFRCLEDNLGIDKRVTRFVLPVGATINMDGTALYEAVAAIFIAQMNGVILDGGQIVTVSLTATLASIGAASIPSAGLVTMLLILTAVGLPTEDISLLVAVDWLLDRMRTSVNVVGDSFGAGIVYHLSKSELDTIDSQHRMQEDIEMTKTQSIYDDKNHRESNSNQCVYAAHNSVVIDECKVPFPFLDIETCI

SEQ ID NO: 557 - protein, 569 aa, mus musculus
MVSANNMPKQVEVRMHDSHLSSDEPKHRNLGMRMCDKLGKNLLLSLTVFGVILGAVCGGLLRLASPIHPDVVMLIAFPGDILMRMLKMLILPLIISSLITGLSGLDAKASGRLGTRAMVYYMSTTIIAAVLGVILVLAIHPGNPKLKKQLGPGKKNDEVSSLDAFLDLIRNLFPENLVQACFQQIQTVTKKVLVAPPSEEANTTKAVISMLNETMNEAPEETKIVIKKGLEFKDGMNVLGLIGFFIAFGIAMGKMGEQAKLMVEFFNILNEIVMKLVIMIMWYSPLGIACLICGKIIAIKDLEVVARQLGMYMITVIVGLIIHGGIFLPLIYFVVTRKNPFSFFAGIFQAWITALGTASSAGTLPVTFRCLEDNLGIDKRVTRFVLPVGATINMDGTALYEAVAAIFIAQMNGVILDGGQIVTVSLTATLASIGAASIPSAGLVTMLLILTAVGLPTEDISLLVAVDWLLDRMRTSVNVVGDSFGAGIVYHLSKSELDTIDSQHRMQEDIEMTKTQSIYDDKNHRESNSNQCVYAAHNSVVIDECKVTLAANGKSADCSVEEEPWKREK

SEQ ID NO: 558 - protein, 443 aa, mus musculus
MSDMEDDFMCDDEEDYDLEYSEDSNSEPNVDLENQYYNSKALKEDDPKAALSSFQKVLELEGEKGEWGFKALKQMIKINFKLTNFPEMMNRYKQLLTYIRSAVTRNYSEKSINSILDYISTSKQMDLLQEFYETTLEALKDAKNDRLWFKTNTKLGKLYLEREEYGKLQKILRQLHQSCQTDDGEDDLKKGTQLLEIYALEIQMYTAQKNNKKLKALYEQSLHIKSAIPHPLIMGVIRECGGKMHLREGEFEKAHTDFFEAFKNYDESGSPRRTTCLKYLVLANMLMKSGINPFDSQEAKPYKNDPEILAMTNLVSAYQNNDITEFEKILKTNHSNIMDDPFIREHIEELLRNIRTQVLIKLIKPYTRIHIPFISKELNIDVADVESLLVQCILDNTIHGRIDQVNQLLELDHQKRGGARYTALDKWTNQLNSLNQAVVSKLA

SEQ ID NO: 559 - protein, 3014 aa, mus musculus
MATEAGTARPGSVAMETTPELGLQSLGAPPAQNPAEPLCEAGAAVAAARWDLRKYSLLIVIGDIGTESQLRAVRAHLEQGILSWNIDLSSFDLNQQLRLFITRHLAHFSSEVKGQRTLCHQSETLETIILVNPTADSISSEVHHLLSSPSAHKLLILSGQTLEPEGDLILQSGTYSYQNFAQVLHKPEIAQLLSNRDPGIQAFLTVSCLGEGDWSHLGLSSSQETLHLRLNPEPVLPTMDGVAEFSEYVSETVDVPSPFDLLEPPTSGGFLKLSKPCCYIFPGGRGDSALFAVNGFNILVDGGSDRKSCFWKLVRHLDRIDSVLLTHIGADNLPGINGLLQRKVAELEEEQSQGSSSYSDWVKNLISPELGVVFFNVPDKLRLPDASRKAKRSIEEACLTLQHLNRLGIQAEPLYRVVSNTIEPLTLFHKMGVGRLDMYVLNPVKDSKEMQFLMQKWAGNSKAKTGIVLANGKEAEISVPYLTSITALVVWLPANPTEKIVRVLFPGNAPQNKILEGLEKLRHLDFLRYPVATQKDLAAGAVPANLKPSKIKHRADSKESLKAAPKTAMSKLAKREEVLEEGAKEARSELAKELAKSEKKAKEPSEKPPEKPSKPERVRTESSEALKAEKRKLIKDKVGKKHLKEKISKLEEKRDKEKKEIKKERKELKKEEGRKEEKKDAKKDEKRKDTKPELKKFSKPDLKPFTPEVRKTLYKAKAPGRLKVDKGRAARGEKELSSEPRTPPAQKGAAPPPAASGHRELALSSPEDLTQDFEELKREERGLLAEPRDTELGEKPLPADASEQGRPSTAIQVTQPPASVLEQEQVEREKEVVPDFPEDKGSKNRAPDSGAEVEREKETWEERKPREAELTPENIAAAREESEPEVKEDVIEKAELEEMEEVHPSDEEEEETKAESFYQKHMQEALKVIPKGREALGGRELGFQGKAPEKETASFLSSLATPAGAAEHVSYIQDETIPGYSETEQTISDEEIHDEPDERPAPPRFPTSTYDLSGPEGPGPFEASQSAESAVPASSSKTYGAPETELTYPPNMVAAPLAEEEHVSSATSITECDKLSSFATSVAEDQSVASLTAPQTEETGKSSLLLDTVTSIPSSRTEATQGLDYVPSAGTISPTSSLEEDKGFKSPPCEDFSVTGESEKKGESVGRGLTGEKAVGKEEKNVTTSEKLSSQYAAVFGAPGHALHPGEPALGEVEERCLSPDDSTVKMASPPPSGPPSAAHTPFHQSPVEEKSEPQDFQEDSWGDTKHAPGVSKEDAEEQTVKPGPEEAMSEEGKVPLSRSPQAQDTLGSLAGGQTGCTIQLLPEQDKAVVFETGEAGAASGAGSLPGEVRTQEPAEPQKDELLGFTDQSFSPEDAESLSVLSVVSPDTAKQEATPRSPCTPKEQQLHKDLWPMVSPEDTQSLSFSEESPSKETSLDISSKQLSPESLGTLQFGELSLGKEEKGPLVKAEDNSCHLAPVSIPEPHTATVSPPTDEAAGEAGLTDESPAGNLPGSSFSHSALSGDRKHSPGEITGPGGHFMTSDSSLTKSPESLSSPAMEDLAMEWGGKAPGSEDRATEQKEKELERKSETLQQKDQILSEKAALVQRDSVMHQKDEALDEENKPGGQQDKTSEQKGRDLDKKDTAVELGKGPEPKGKDLYLEDQGLAEKDKALEQRGAALQQTQAPEPRARAQEHRDLEQKDEHLELRDKTPEEKDKVLVLEDRAPEHIIPQPTQTDRAPEHRSKVDKEQKDEASEEKEQVLEQKDWAREKEGAALDQDNRAAGQKDGTLKEDKTQGQKSSFLEDKSTTPKEMTLDQKSPEKAKGVEQQDGAVPEKTRALGLEESPEEEGKAREQEEKYWKEQDVVQGWRETSPTRGEPVPAWEGKSPEQEVRYWRDRDITLQQDAYWKELSCERKVWFPHELDGQGARPRYSEERESTFLDEGPNEQEITPLQHTPRSPWASDFKDFQEPLPQKGLEVERWLAESPVGLPPEEEDKLTRSPFEIISPPASPPEMTGQRVPSAPGQESPVPDTKSTPPTRNEPTTPSWLAEIPPWVPKDRPLPPAPLSPAPAPPTPAPDPHAPAPFSWGIAEYDSVVAAVQEGAAELEGGPYSPLGKDYRKAEGEREGEGGAGAPDSSSFSSKVPEVTESHTTRDAEQTEPEQREPTPYPDERSFQYADIYEQMMLTGLGPACPTREPPLGASGDWPPHLSTKEEAAGRNKSAEKELSSAVSPPNLHSDTPTFSYASLAGPTIPPRQEPEPGPNVEPSFTPPAVPPRAPISLSQDPSPPLNGSTTSCGPDRRTPSPKEAGRSHWDDGTNDSDLEKGAREQPEKETQSPSPHHPMPVGHPSLWPETEAHSSLSSDSHLGPVRPSLDFPASAFGFSSLQPAPPQLPSPAEPRSAPCGSLAFSGDRALALVPGTPTRTRHDEYLEVTKAPSLDSSLPQLPSPSSPGAPLLSNLPRPASPALSEGSSSEATTPVISSVAERFPPGLEVAEQSSGELGPGNEPAAHSLWDLTPLSPAPLASRDLAPAPAPAPAPSLPGNLGDGTLSCRPECSGELTKKPSPFLSHSGDHEANGPGETSLNPPGFATATAEKEEAEALHAWERGSWPEGAERSSRPDTLLSSEQRPGKSSGGPPCSLSSEVEAGPQGCATDPRPHCGELSPSFLNPPLPPSTDDSDLSTEEARLAGKGGRRRAGRPGATGGPCPMADETPPTSASDSGSSQSDSDVPPETEECPSITAEAALDSDEDGDFLPVDKAGGVSGTHHPRPGHDPPPAPLPDPRPPPPRPDVCMADPEGLSSESGRVERLREKVQGRPGRKAPGRAKPASPARRLDIRGKRSPTPGKGPVDRTSRALPRPRSTPSQVTSEEKDGHSPMSKGLVNGLKAGSTALGSKGSSGPPVYVDLAYIPNHCSGKTADQDFFRRVRASYYVVSGNDPANGEPSRAVLDALLEGKAQWGENLQVTLIPTHDTEVTREWYQQTHEQQQQLNVLVLASSSTVVMQDESFPACKIEF

SEQ ID NO: 560 - protein, 336 aa, mus musculus
MENHKNITEFIFMGLWENRQIELLFFFLFLLCYLAVLMGNSVIFLTITCSHLIEQPMYYFLCHLSLMDLCYPSTVIPRLIRDLAATRKNISYNECMTQLFTAHLLAGVEIFILVSMALDRYVAIVKPLHYMVIMSRKRCDMLIVTAWILGFWHSIALLLMVLSLPFCGPNHINHYFCDIKPLLKLVCKDVHVVSILAIVNSGMVLFAIFIVLLASYILILYSLRTRSSAGKRKALSTCSSHIMVVVLFFGPCIYTYVLPAGSENKDKEISVFYTVIAPILNPVIYTLRNSEMKSAMHKVWSRLSNLGLKYVKPSCNSALMFLGQLLSNRSQKVQTI

SEQ ID NO: 561 - protein, 151 aa, mus musculus
MAPKRQSAILPQPKKPRPAAAPKLEDKSASPGLPKGEKEQQEAIEHIDEVQNEIDRLNEQASEEILKVEQKYNKLRQPFFQKRSELIAKIPNFWVTTFVNHPQVSALLGEEDEEALHYLTRVEVTEFEDIKSGYRIDFYFDENPYFENKVL

SEQ ID NO: 562 - protein, 663 aa, mus musculus
MGRYRVRVVTGAWLFSGSLNLVRLWLVGEHREAKLELQLRPARGKEEEFDFDVPEDLGPLQFVKLHKQHTVVDDAWFCNLITVQGPGTSAEAVFPCYRWVQGEGILSLPEGTARLAGDNALDVFQKYREKELKERQQTYCWATWKEGLPQTIAADCKDDLPPNMRFHEEKRLDFEWTLKAGVLEMGLKRVYTLLRSWNHLEDFDQIFWGQKSALAEKVHQCWQEDELFGYQFLNGANPMLLRRSTSLPSRLVLPSGMEELQAQLEKELKNGSLFEADFILLDGIPANVIRGEPQYLAAPLVMLRMDPGGKLLPMAIQIQPPNPSSPAPTLFLPSDPPLAWLLAKIWVRNSDFQLQELQFHLLNTHLVAEVIAVATMRCLPGLHPIFKLLVPHIRYTMEINTRSRTQLISDGGIFDQVVSTGGGGHVQLLTRAVAQLTYHSLCPPDDLANRGLLRIPSALYARDALQLWEVTARYVKGMVHLFYQSDDIVRGDPELQAWCREITEVGLCHAQDRGFPVSFQSRAQLCHFLTMCVFTCTAQHAAINQGQLDWYGWVPNAPCTMRMPPPTSKDDVTMETVMGSLPDVQKACLQMTITWHLGRLQPDMVPLGHHTEKYFSDPRTKAVLSQFQADLDNLEKEITARNEQLDLPYEYLKPSRIENSITI

SEQ ID NO: 563 - protein, 291 aa, mus musculus [sequence omitted]

SEQ ID NO: 564 - protein, 631 aa, mus musculus
MNAAASSYPMASLYVGDLHSDVTEAMLYEKFSPAGPVLSIRVCRDMITRRSLGYAYVNFQQPADAERALDTMNFDVMKGKPIRIMWSQRDPSLRKSGVGNVFIKNLDKSIDNKALYDTFSAFGNILSCKVVCDENGSKGYAFVHFETQEAADKAIEKMNGMLLNDRKVFVGRFKSRKEREAELGAKAKEFTNVYIKNFGEEVDDGNLKELFSQFGKTLSVKVMRDSSGKSKGFGFVSYEKHEDANKAVEEMNGKEMSGKAIFVGRAQKKVERQAELKRKFEQLKQERISRYQGVNLYIKNLDDTIDDEKLRREFSPFGSITSAKVMLEDGRSKGFGFVCFSSPEEATKAVTEMNGRIVGSKPLYVALAQRKEERKAHLTNQYMQRVAGMRALPASAILNQFQPAAGGYFVPAVPQAQGRPPYYTPNQLAQMRPNPRWQQGGRPQGFQGMPSALRQSGPRPALRHLAPTGNAPASRGLPTTAQRVGVPTAVPNLAPRAAVAAAAPRAVAPYKYASSVRSPHPAIQPLQAPQPAVHVQGQEPLTASMLAAAPPQEQKQMLGERLFPLIQTMHSNLAGKITGMLLEIDNSELLHMLESPESLRSKVDEAVAVLQAHHAKKEAAQKVGTVAAATS

SEQ ID NO: 565 - protein, 245 aa, mus musculus
MEKTELIQKAKLAEQAERYDDMATCMKAVTEQGAELSNEERNLLSVAYKNVVGGRRSAWRVISSIEQKTDTSDKKLQLIKDYREKVESELRSICTTVLELLDKYLIANATNPESKVFYLKMKGDYFRYLAEVACGDDRKQTIENSQGAYQEAFDISKKEMQPTHPIRLGLALNFSVFYYEILNNPELACTLAKTAFDEAIAELDTLNEDSYKDSTLIMQLLRDNLTLWTSDSAGEECDAAEGAEN

SEQ ID NO: 566 - protein, 740 aa, mus musculus
MSFGRDMELEHFDERDKAQRYSRGSRVNGLPSPTHSAHCSFYRTRTLQTLSSEKKAKKVRFYRNGDRYFKGIVYAISPDRFRSFEALLADLTRTLSDNVNLPQGVRTIYTIDGLKKISSLDQLVEGESYVCGSIEPFKKLEYTKNVNPNWSVNVKTTSASRAVSSLATAKGGPSEVRENKDFIRPKLVTIIRSGVKPRKAVRILLNKKTAHSFEQVLTDITDAIKLDSGVVKRLYTLDGKQVMCLQDFFGDDDIFIACGPEKFRYQDDFLLDESECRVVKSTSYTKIASASRRGTTKSPGPSRRSKSPASTSSVNGTPGSQLSTPRSGKSPSPSPTSPGSLRKQRISQHGGSSTSLSSTKVCSSMDENDGPGEEESEEGFQIPATITERYKVGRTIGDGNFAVVKECIERSTAREYALKIIKKSKCRGKEHMIQNEVSILRRVKHPNIVLLIEEMDVPTELYLVMELVKGGDLFDAITSTSKYTERDASGMLYNLASAIKYLHSLNIVHRDIKPENLLVYEHQDGSKSLKLGDFGLATIVDGPLYTVCGTPTYVAPEIIAETGYGLKVDIWAAGVITYILLCGFPPFRGSGDDQEVLFDQILMGQVDFPSPYWDNVSDSAKELINMMLLVNVDQRFSAVQVLEHPWVNDDGLPENEHQLSVAGKIKKHFNTGPKPSSTAAGVSVIATTALDKERQVFRRRRNQDVRSRYKAQPAPPELNSESEDYSPSSSETVRSPNSPF

SEQ ID NO: 567 - protein, 146 aa, mus musculus [sequence omitted]

SEQ ID NO: 568 - protein, 305 aa, mus musculus
MADVSVDQSKLPGVKEVCRDFAVLEDHTLAHSLQEQEIEHHLASNIQRNRLVQHDLQVAKQLQEEDLKAQAQLQKRYKALEQHDCEIAQEIQEKLTIEAERRRIQEKKDEDIARLLQEKELQEEKRRKKHTPEFSGGSVFGDNYYHEDGGMKPRGIKEAVSTPARASHRDQEWYDAEIARKLQEEELLATHVDMRAAQVAQDEEIARLLMAEEKKAYKKAKEREKSSLDKRKHDPECKLKAKSAHSKSKEGDEAHRSKIDRPSRPPPPTMMGLEDTDPTHFTNQHSTTWHLPKSESSQKGFHNKQ

SEQ ID NO: 569 - protein, 247 aa, mus musculus
MVDREQLVQKARLAEQAERYDDMAAAMKNVTELNEPLSNEERNLLSVAYKNVVGARRSSWRVISSIEQKTSADGNEKKIEMVRAYREKIEKELEAVCQDVLSLLDNYLIKNCSETQYESKVFYLKMKGDYYRYLAEVATGEKRATVVESSEKAYSEAHEISKEHMQPTHPIRLGLALNYSVFYYEIQNAPEQACHLAKTAFDDAIAELDTLNEDSYKDSTLIMQLLRDNLTLWTSDQQDDDGGEGNN

SEQ ID NO: 570 - protein, 221 aa, mus musculus
MSILRIHAREIFDSRGNPTVEVDLYTAKGLFRAAVPSGASTGIYEALELRDNDKTRFMGKGVSRPVKYVNEFLAPALCTQKVNVVEQEKIDKLMIEMDGTENKSKFGANAILGVSLAVCKAGAVEKGVPLYRHIADLAGNPEVILPVPAFNVINGGSHAGNKLAMQEFMILPVGASSFREAMRIGAEVYHNLKNVIKEKYGKDATNVGDEGGFAPNILENK

SEQ ID NO: 571 - protein, 415 aa, mus musculus
MAPVSGSRSPEREASGAKRRSPSRSPKSIKSSRSPRCRRSRSRSCSRFGDRNGLSHSLSGFSQSSRNQSYRSRSRSRSRERPSAQRSAPFASASSSAYYGGYSRPYGGDKPWPSLLDKEREESLRQKRLSERERIGELGAPEVWGLSPKNPEPDSDEHTPVEDEEPKKSTTSASSSEDDKKKKRKSSHSKDRAKKKRKKKSSKRKHKKYSEDSDSDSESDTDSSDEDSKRRAKKAKKKDKKKKRRGKKYKKKKSKKNRKESSDSSSKESQEEFLENPWKDRSKAEEPSDLIGPEAPKTLASQDDKPLNYGHALLPGEGAAMAEYVKAGKRIPRRGEIGLTSEEIASFECSGYVMSGSRHRRMEAVRLRKENQIYSADEKRALASFNQEERRKRENKILASFREMVYRKTKGKDDK

SEQ ID NO: 572 - protein, 363 aa, mus musculus
MPHSYPALSAEQKKELSDIALRIVTPGKGILAADESVGSMAKRLSQIGVENTEENRRLYRQVLFSADDRVKKCIGGVIFFHETLYQKDDNGVPFVRTIQDKGILVGIKVDKGVVPLAGTDGETTTQGLDGLLERCAQYKKDGADFAKWRCVLKISDRTPSALAILENANVLARYASICQQNGIVPIVEPEILPDGDHDLKRCQYVTEKVLAAVYKALSDHHVYLEGTLLKPNMVTPGHACPIKYSPEEIAMATVTALRRTVPPAVPGVTFLSGGQSEEEASLNLNAINRCPLPRPWALTFSYGRALQASALNAWRGQRDNAGAATEEFIKRAEMNGLAAQGRYEGSGDGGAAAQSLYIANHAY

SEQ ID NO: 573 - protein, 309 aa, mus musculus
MEQLLRAQLHTTTLRAFGSSGGGCISEGYAYYTDSGPVFVKVNRRTQARQMFEGEMASLEALRNTGLVRVPKPMKVIDLPGGGAVFVMEHLKMKSLSSQASKLGEQMADLHLYNQKLREKSKTRQNTVGCGAEGAEPQGVTKFGFHTVTCCGFIPQVNEWQEDWPTFFTRHRLQAQLDLIEKDYADRETQELWSRLQVKIPDLFAGIEIVPALLHGDLWSGNVAEDDQGPVIYDPASFYGHSEFELAIASMFGGFPRSFFTAYHRKIPKAPGFDKRLLLYQLFNYLNHWNHFGREYRSPSLGVMRKLLR

SEQ ID NO: 574 - protein, 295 aa, mus musculus
MEEEIAALVIDNGSGMCKAGFAGDDAPRAVFPSIVGRPRHQIMFETFNTPAMYVAIQAVLSLYASGRTTGIVMDSGDGVTHTVPIYEGYALPHAILRLDLAGRDLTDYLMKILTERGYSFTTTAEREIVRDIKEKLCYVALDFEQEMATAASSSSLEKSYELPDGQVITIGNERFRCPEALFQPSFLGMESCGIHETTFNSIMKCDVDIRKDLYANTVLSGGTTMYPGIADRMQKEITALAPSTMKIKIIAPPERKYSVWIGGSILASLSTFQQMWISKQEYDESGPSIVHRKCF

SEQ ID NO: 575 - protein, 1977 aa, mus musculus
MSESEVGKDTTPEPSPANGTGPGPEWGLCPGPPTVGTDTSGASGLGTPRRRTQHNKHKTVAVASAQRSPRALFCLTLTNPIRRSCISIVEWKPFDILILLTIFANCVALGVYIPFPEDDSNTANHNLEQVEYVFLVIFTVETVLKIVAYGLVLHPSAYIRNGWNLLDFIIVVVGLFSVLLEQGPGRPGDAPHTGGKPGGFDVKALRAFRVLRPLRLVSGVPSLHIVLNSIMKALVPLLHIALLVLFVIIIYAIIGLELFLGRMHKTCYFLGSDMEAEEDPSPCASSGSGRSCTLNHTECRGRWPGPNGGITNFDNFFFAMLTVFQCITMEGWTDVLYWMQDAMGYELPWVYFVSLVIFGSFFVLNLVLGVLSGEFSKEREKAKARGDFQKLREKQQMEEDLRGYLDWITQAEELDLHDPSVDGNLASLAEEGRAGHRPQLSELTNRRRGRLRWFSHSTRSTHSTSSHASLPASDTGSMTDTPGDEDEEEGTMASCTRCLNKIMKTRICRHFRRANRGLRARCRRAVKSNACYWAVLLLVFLNTLTIASEHHGQPLWLTQTQEYANKVLLCLFTVEMLLKLYGLGPSVYVASFFNRFDCFVVCGGILETTLVEVGAMQPLGISVLRCVRLLRIFKVTRHWASLSNLVASLLNSMKSIASLLLLLFLFIIIFSLLGMQLFGGKFNFDQTHTKRSTFDTFPQALLTVFQILTGEDWNVVMYDGIMAYGGPFFPGMLVCVYFIILFICGNYILLNVFLAIAVDNLASGDAGTAKDKGREKSSEGNPPKENKVLVPGGENEDAKGARSEGAAPGMEEEEEEEEEEEEEEEEENGAGHVELLQEVVPKEKVVPIPEGSAFFCLSQTNPLRKACHTLIHHHIFTSLILVFIILSSVSLAAEDPIRAHSFRNHILGYFDYAFTSIFTVEILLKMTVFGAFLHRGSFCRSWFNLLDLLVVSVSLISFGIHSSAISVVKILRVLRVLRPLRAINRAKGLKHVVQCVFVAIRTIGNIMIVTTLLQFMFACIGVQLFKGKFYSCTDEAKHTLKECKGSFLIYPDGDVSRPLVRERLWVNSDFNFDNVLSAMMALFTVSTFEGWPALLYKAIDANAEDEGPIYNYHVEISVFFIVYIIIIAFFMMNIFVGFVIITFRAQGEQEYQNCELDKNQRQCVEYALKAQPLRRYIPKNPHQYRVWATVNSAAFEYLMFLLILLNTVALAMQHYEQTAPFNYAMDILNMVFTGLFTIEMVLKIIAFKPKHYFADAWNTFDALIVVGSVVDIAVTEVNSSEDSSRISITFFRLFRVMRLVKLLSKGEGIRTLLWTFIKSFQALPYVALLIAMIFFIYAVIGMQMFGKVALQDGTQINRNNNFQTFPQAVLLLFRCATGEAWQEIMLASLPGNRCDPESDFGPGEEFTCGSSFAIVYFISFFMLCAFLIINLFVAVIMDNFDYLTRDWSILGPHHLDEFKRIWSEYDPGAKGRIKHLDVVALLRRIQPPLGFGKLCPHRVACKRLVAMNVPLNSDGTVTFNATLFALVRTSLKIKTEGNLDQANQELRMVIKKIWKRIKQKLLDEVIPPPDEEEVTVGKFYATFLIQDYFRKFRRRKEKGLLGREAPTSTSSALQAGLRSLQDLGPEIRQALTYDTEEEEEEEEAVGQEAEEEEAENNPEPYKDSIDSQPQSRWNSRISVSLPVKEKLPDSLSTGPSDDDGLAPNSRQPSVIQAGSQPHRRSSGVFMFTIPEEGSIQLKGTQGQDNQNEEQEVPDWTPDLDEQAGTPSNPVLLPPHWSQQHVNGHHVPRRRLLPPTPAGRKPSFTIQCLQRQGSCEDLPIPGTYHRGRTSGPSRAQGSWAAPPQKGRLLYAPLLLVEESTVGEGYLGKLGGPLRTFTCLQVPGAHPNPSHRKRGSADSLVEAVLISEGLGLFAQDPRFVALAKQEIADACHLTLDEMDSAASDLLAQRTTSLYSDEESILSRFDEEDLGDEMACVHAL

SEQ ID NO: 576 - protein, 314 aa, mus musculus
MLLLADMDVVNQLVAGGQFRVVKEPLGFVKVLQWVFAIFAFATCGSYTGELRLSVECANKTESALNIEVEFEYPFRLHQVYFDAPSCVKGGTTKIFLVGDYSSSAEFFVTVAVFAFLYSMGALATYIFLQNKYRENNKGPMMDFLATAVFAFMWLVSSSAWAKGLSDVKMATDPENIIKEMPMCRQTGNTCKELRDPVTSGLNTSVVFGFLNLVLWVGNLWFVFKETGWAAPFMRAPPGAPEKQPAPGDAYGDAGYGQGPGGYGPQDSYGPQGGYQPDYGQPASGGGGGYGPQGDYGQQGYGQQGAPTSFSNQM

SEQ ID NO: 577 - protein, 509 aa, mus musculus
MVDGVMILPVLMMMAFPSPSVEDEKPKVNQKLYMCVCEGLSCGNEDHCEGQQCFSSLSINDGFHVYQKGCFQVYEQGKMTCKTPPSPGQAVECCQGDWCNRNITAQLPTKGKSFPGTQNFHLEVGLIILSVVFAVCLLACILGVALRKFKRRNQERLNPRDVEYGTIEGLITTNVGDSTLAELLDHSCTSGSGSGLPFLVQRTVARQITLLECVGKGRYGEVWRGSWQGENVAVKIFSSRDEKSWFRETELYNTVMLRHENILGFIASDMTSRHSSTQLWLITHYHEMGSLYDYLQLTTLDTVSCLRIVLSIASGLAHLHIEIFGTQGKSAIAHRDLKSKNILVKKNGQCCIADLGLAVMHSQSTNQLDVGNNPRVGTKRYMAPEVLDETIQVDCFDSYKRVDIWAFGLVLWEVARRMVSNGIVEDYKPPFYDVVPNDPSFEDMRKVVCVDQQRPNIPNRWFSDPTLTSLAKLMKECWYQNPSARLTALRIKKTLTKIDNSLDKLKTDC

SEQ ID NO: 578 - protein, 169 aa, mus musculus
MSSGNAKIGYPAPNFKATAVMPDGQFKDISLSEYKGKYVVFFFYPLDFTFVCPTEIIAFSDRADEFKKLNCQVIGASVDSHFCHLAWINTPKKQGGLGPMNIPLISDPKRTIAQDYGVLKADEGISFRGLFIIDDKGILRQITINDLPVGRSVDEIIRLVQAFQFTDKH

SEQ ID NO: 579 - protein, 87 aa, mus musculus
MNPDTSRVLSGTVGARYQCLKMSEEEEIIYINMESDTDDSHISYDGDELFSEDFGSDIEDTSSFEGLTVDSELEDSDLDSFVEESLS

SEQ ID NO: 580 - protein, 362 aa, mus musculus
MDRLERPLVNLPLLLDPSSYVPDTVDLTDDALARQYWLTCFEEALDGVVKRAVASQPESMDAVERAEKFRQKYWGKLQTLRHQPFAYGTLTVRSLLDTREHCLNEFNFPDPYSKVKQKENGLALKCFQSVTRSLDSLGWEERQLALVKGLLAGNVFDWGAKAVSDVLESDPQFGFEEAKRKLQERPWLVDSYTKWLQRLKGPPHKCALIFADNSGIDIILGVFPFVRELLFRGTEVILACNSGPALNDVTYSESLIVAERIAAMDPIICTALREDRLLLVQTGSSSPCLDLSRLDKGLAVLVRERGADLVVIEGMGRAIHTNYHALLRCESLKLAVVKNAWLAERLGGQLFSVIFKYEVPTK

SEQ ID NO: 581 - protein, 229 aa, mus musculus
MDHRCRSRGMSHSRVSGSHIRTPRVPLPFHVEQEAREGEEWERELPRQRPIIYGPPESEELQETVMISKPAPYWEGTAVINGEFKELKLTDYRGKYLVFFFYPLDFTFVCPTEIIAFGDRIEEFKSINTEVVACSVDSQFTHLAWINTPRRQGGLGPIRIPLLSDLNHQISKDYGVYLEDSGHTLRGLFIIDDKGVLRQITLNDLPVGRSVDETLRLVQAFQYTDKHGE

SEQ ID NO: 582 - protein, 1455 aa, mus musculus
MAGPGSWRDKEVTDLGQLPDPTGIFSLDKAIGLGTYGRIFLGIHEKTGSLVAVKVMSARKTPLPEIGRRVRVNKYQKSVGWRYSDEEEDLRTELNLLRKYSFHKNIVTFYGAFFKLNPPGHQHQLWMVMELCAAGSVTDVVRMTRNQSLKEDWIAYICREILQGLAHLHAHQVIHRDIKGQNVLLTHDAEVKIVDFGVSAQVSRTNGRRNSFIGTPYWMAPEVIHCDEDPRCSYDYRSDVWSVGITAIEMAEGAPPLCKLQPLEALCVILREAAPKVKSSGWSRKFQNFMENCMIKNFLFRPTSGNMLLHPFVHDIKNERRVVESLTKHLTGIIQKREKKGIPVAFEGEEAAKEQYITRRFRWPSCTPELLRVPTSSRCRPLRVLHGEPPQPRWLPDQEDPQDQELQQLQKAAGVFMPLHSQDNTSKLFPKQVEVAPYLRGAAQVVMPVLVQVEAPPQVSKAAQMLKSLPTQDNKATSPEVQAPVAEGQQAQHEALETEQPKDLDQVPEEFQGQDRAPEQPRQGQAAEQQQIHNPVPEQPPEEDREPEQAEVQEEAVEPPQAEIEDKEPEVVQVHAQVLLPLLSQNRHVLLPLHLDRQLLIPVGEQNEEVPRAQAWDLEASRAVGAVQALIEGLSRDLLRAPNAFVTKPLGPLQIFLENLSTDGFYTEPEPTQKKKSKVASLRKAIAKRLRPKRFRAKALWRLEDFEFSDVETSRRRRHRRWEDIFNQHEEQLRRVENDREDDSSDNDEVFHSIQAEVQIEPHAANPAGNEVHERSAPMPCNRNRTHRVKFSPSVGEEEPSLEEAQPQQQQQQPMNIRPRNCLNPQNFQAQSDSSSEEDSPVTRRKSQSSPPYSTIDQKLLIDIHVPDGFKVGKISPPVYLTNEWVGYNALSEIFWDDWIMPTRPARPPEEDGDYVELYDADANANGDEEVANGAYEDPRDGANGHDDMNNQLDQANGYEGHGAAGYNGGDVGGNHGAAFNGPRANYPRAGILKNGHNDGRALNRGAFGVFGDNAARAFHGAAGEAGAAFGNHGANRGNGRGNRNREANGRNEENGAFGRDQHVFPEFEHEESDRGTETSDSIALEITSFDGEQNSGRPVSSTTMGFPIGRSSPRGSDFGSDISYNSPILHVYEKDFSSEVYCGSLWGVNLLLGTQSHLYLMDRSGKAEIVKLIKRRPFRQIQVVEQLNLLITISGKKNRLRVYHLSWLRNKILNNDPKSKKRQKAMRKKEEACKAIDKLIGCEHFSVLQHEETTYIAVAVKSSIHLFAWAPKSFDENTAIKVFPTRDLKPLTVDLAVGSEKTLKIFFSSANGYHIIDAESEVMSEVTLPNNNVVILPDCLGLGVMLSLNAEAASEEANEQLLKKILDVWKDIPSSVAFECTKRITGWDQKAIEVRSLQSTILENELKRRSIKKLRFLCARGDKMFFASTLSNDHSRVYLMSLGKLEELHRSYAV

SEQ ID NO: 583 - protein, 218 aa, mus musculus
MPTRSPSVVISDDEPGYDLDLFCIPNHYAEDLEKVFIPHGLIMDRTERLARDVMKEMGGHHIVALCVLKGGYKFFADLLDYIKALNRNSDRSIPMTVDFIRLKSYCNDQSTGDIKVIGGDDLSTLTGKNVLIVEDIIDTGKTMQTLLSLVKQYSPKMVKVASLLVKRTSRSVGYRPDFVGFEIPDKFVVGYALDYNEYFRDLNHVCVISETGKAKYKA

SEQ ID NO: 584 - protein, 788 aa, mus musculus
MSEEQWVSLSSEEFDQLQKYSEYSSKKIKDVLAEFNEGGSLRQYDPHKPISYDVFKLFMRAYLEVDLPQPLSTHLFLAFSQKPRQETPDHPKEGASSSEPNVSDYNSDNAAKADEACAPDTESKTTKTQAPSKELEAAAPWEDPGALASSSDAPVVYLKDVVCYLSLMETGRPQDKLEFMFRLYDSDENGLLDQAEMDQIVSQMLHVAQYLEWDPTELRPILKEMLQGMDYDKDGFVSLQEWINGGMTTIPLLVLLGMDDSGSKGDGRHAWTLKHFKKPTYCNFCRAMLMGVGKQGLCCIYCKYTVHQRCVSKTIHGCVKTNSKAKRSGEVMQHAWVEGNSSVKCDRCHKSIKCYQSVTARHCVWCRMTFHRKCELSTVCDGGELKDHILLPTSICPVSGDRQGGKSDGSVAAKGELVTQYKIIPSPGTHPLLVLVNPKSGGRQGERILRKFHYLLNPEQVFNLDNGGPTPGLNFFHDTPDFRVLACGGDGTVGWILDCIDKANFTKHPPVAVLPLGTGNDLARCLRWGGGYEGGSLTKILKEIEQSPLVMLDRWYLEVMPREEVENGDQVPYNIMNNYFSIGVDASIAHRFHMMREKHPEKFNSRMKNKLWYFEFGTSETFAATCKKLHDHIELECDGVEVDLSNIFLEGIAILNIPSMYGGTNLWGETKKNRAVIRESRKSVTDPKELKCCVQDLSDQLLEVVGLEGAMEMGQIYTGLKSAGRRLAQCSSVTIRTNKLLPMQVDGEPWMQPQCTIKITHKNQAPMMMGPPQKSSFFSLRRKSRSKD

SEQ ID NO: 585 - protein, 333 aa, mus musculus
MFRAAAPGQLRRAASLLRFQSTLVIAEHANDSLAPITLNTITAAGRLGGEVSCLVAGTKCDKVVQDLCKVAGVAKVLVAQHDAYKGLLPEELTPLILETQKQFSYTHICAGASAFGKNLLPRVAAKLNVAPVSDIIEIKSPDTFVRTIYAGNALCTVKCDEKVKVFSVRGTSFEAAATSGGSASSEKAPSSSSVGISEWLDQKLTKSDRPELTGAKVVVSGGRGLKSGENFKLLYDLADQLHAAVGASRAAVDAGFVPNDMQVGQTGKIVAPELYIAVGISGAIQHLAGMKDSKTIVAINKDPEAPIFQVADYGIVADLFKVVPEMTEILKKK

SEQ ID NO: 586 - protein, 188 aa, mus musculus
MASKRALVILAKGAEEMETVIPVDVMRRAGKVTVAGLAGKDPVQCSRDVMICPDTSLEDAKTQGPYDVVVLPGGNLGAQNLSESPMVKEILKEQESRKGLIAAICAGPTALLAHEVGFGCKVTTHPLAKDKMMNGSHYSYSESRVEKDGLILTSRGPGTSFEFALAIVEALVGKDMANQVKAPLVLKD

SEQ ID NO: 587 - protein, 191 aa, mus musculus
MGKQNSKLAPEVMEDLVKSTEFNEHELKQWYKGFLKDCPSGRLNLEEFQQLYVKFFPYGDASKFAQHALRTFDKNGDGTIDFREFICALSITSRGSFEQKLNWAYNMYDLDGDGKITRVEMLEIIEAIYKMVGTVIMMKMNEDGLTPEQRVDKIFSKMDKNKDDQITLDEFKEAAKSDPSIVLLLQCDIQK

SEQ ID NO: 588 - protein, 361 aa, mus musculus
MDTGVIEGGLNVTLTIRLLMHGKEVGSIIGKKGESVKKMREESGARINISEGNCPERIITLAGPTNAIFKAFAMIIDKLEEDISSSMTNSTAASRPPVTLRLVVPASQCGSLIGKGGCKIKEIRESTGAQVQVAGDMLPNSTERAITIAGIPQSIIECVKQICVVMLESPPKGVTIPYRPKPSSSPVIFAGGQDRYSTGSDSASFPHTTPSMCLNPDLEGPPLEAYTIQGQYAIPQPDLTKLHQLAMQQSHFPMTHGNTGFSGIESSSPEVKGYWGLDASAQTTSHELTIPNDLIGCIIGRQGAKINEIRQMSGAQIKIANPVEGSTDRQVTITGSAASISLAQYLINVRLSSETGGMGSS

SEQ ID NO: 589 - protein, 416 aa, mus musculus
MLLSVPLLLGLLGLAAADPAIYFKEQFLDGDAWTNRWVESKHKSDFGKFVLSSGKFYGDLEKDKGLQTSQDARFYALSAKFEPFSNKGQTLVVQFTVKHEQNIDCGGGYVKLFPSGLDQKDMHGDSEYNIMFGPDICGPGTKKVHVIFNYKGKNVLINKDIRCKDDEFTHLYTLIVRPDNTYEVKIDNSQVESGSLEDDWDFLPPKKIKDPDAAKPEDWDERAKIDDPTDSKPEDWDKPEHIPDPDAKKPEDWDEEMDGEWEPPVIQNPEYKGEWKPRQIDNPDYKGTWIHPEIDNPEYSPDANIYAYDSFAVLGLDLWQVKSGTIFDNFLITNDEAYAEEFGNETWGVTKAAEKQMKDKQDEEQRLKEEEEDKKRKEEEEAEDKEDDDDRDEDEDEEDEKEEDEEESPGQAKDEL

SEQ ID NO: 590 - protein, 944 aa, mus musculus
MEIVLSWGLAAHCTAAALAALSLYNMSSAGGDRLGRGKSARCGLTFSVGRVYRWMVDSRVALRIHEHAAIYLTACMESLFRDIYSRVLASGLPRSCSGPGPGSSSGSGPGPGSGPGAPAADKERETPGGGAASGGPCSAASSASGGSSCCAPPATAATAVPPTTATAAAAANHHHHHHTLHEAPKFTVETLEHTVNNDSEIWGLLQPYQHLICGKNASGVLSLPESLNLHRDPQRPSKPGELPMFSQSELRTIEQSLLATRVGSIAELSDLVSRAMHHLQPLNAKHHGNGTPMHHKQGALYWEPEALYTLCYFMHCPQMEWENPNVEPSKVNLQVERPFLVLPPLMEWIRVAVAHAGHRRSFSMDSDDVRQAARLLLPGVDCEPRQLKADDCFCASRKLDAVAIEAKFKQDLGFRMLNCGRTDLVKQAVSLLGPDGINTMSEQGMTPLMYACVRGDEAMVQMLLDAGADLNVEVVSTPHKYPSVHPETRHWTALTFAVLHGHIPVVQLLLDAGAKVEGSVEHGEENYSETPLQLAAAVGNFELVSLLLERGADPLIGTMYRNGISTTPQGDMNSFSQAAAHGHRNVFRKLLAQPEKEKSDILSLEEILAEGTDLAETAPPPLCASRNSKAKLRALREAMYHSAEHGYVDVTIDIRSIGVPWTLHTWLESLRIAFQQHRRPLIQCLLKEFKTIQEEEYTEELVTQGLPLMFEILKASKNEVISQQLCVIFTHCYGPYPIPKLTEIKRKQTSRLDPHFLNNKEMSDVTFLVEGRPFYAHKVLLFTASPRFKALLSSKPTNDNTCIEIGYVKYPIFQLVMQYLYYGGPESLLIKNNEIMELLSAAKFFQLEALQRHCEIICAKSINTDNCVDIYSHAKFLGVTELSAYCEGYFLKNMMVLIENEAFKQLLYDKNGEGAGQDVLQDLQRTLAIRIQSIHLSSSKGSVV

SEQ ID NO: 591 - protein, 2221 aa, mus musculus
MPEMTEHETPTKKQHRKKNRETHNAVERHRKKKINAGINRIGELIPCSPALKQSKNMILDQAFKYITELKRQNDELLLNGGSSEQAEEIKKLRKQLEEIQKENGRYIELLKANDICLYDDPTIHWKGNLKTSKVSVVIPSDQVQKNIIVYSNGSQPGGNSQGTAVQGITFNVGHGLQKQTANVVPVQRTCKLVTPVSISGVYPSENKPWHQTTVSALAANQSVPLCLPAAISAQNILELSTSESQSSGLGATGGSVVTVSVGPDPHPHRSSNTCLNDQNASENNNAQESPKSSKKTVTCVSGISSSTSAAAPEVHHENKSSPAMQGSSADSQNTLVSVTTTVCSQPPRSTGGSSPVSGSKTVDSPSTATVVVPAHAAVAKSTLPVSSLSANPLEGGWTLSCSLPSSSVSASELKNISSLTRISSAGNTQTTWTTLHLAGNTIQPLSQPPSSAATPALNECGTSPTPNNHKHVATAITLNNSPPTDGQPVEQVVVTLPSCPPLPMQPLIAQPQVKSQPPKNILPLNSAMQVIQMAQPVGSGVTAAPANQNVIILQPPSTTPCPTMMRAEVSNQTVGQQIVIIQAANQNPLPLLSAPHPGPVRLPVNGASAIIGSHNSVQNVPAPQTFGGKHLVHILPRPSSLSTSNSTQTFSVTMSNQQQPQTISLNGQLFALQPVMSSSGTTNQSPMQIIQPTTSEDPNTNVALNTFGALASLNQSISQMAGQSCVQLSISHSANPQTSANSQTSPANCVSLTTTVAPTITVDNSATPSTTYSLATASSTNTVTCLPSTMKSKRLSKKPGAKKHLTANKPACPLNSVRDVGKIDGPRINSSAEPSCSDGLLDSLPVGLSSVAVSQAKNVSISASHSLDVLNSESVTPDSGPQSKSTEDCSSPSHESETNEQLVLAPAKPKDSTPILQETSQGTPPCSVALSNDMKSCTSANVLTPSPIESQSLVSQVSGLSSTTSTSSTDCISEVEIVAEPCPVQQDSLDTMQTAGSLKGQGLTMLLSDLAKEKDLQRSSLSVQMEHPDFSPESSKIGDSNVDLPPKQELLLMSDDRDPPQPHSCLPDQEVLHGSLLTSRQADSPLSTSSGSSRSFSVASMLPETAREDVTSSTTSNTCDGCTFAEQTDIVALAARAILDQESIEKGRLGTQADVKEVTPKPSETSLEGDQPFKPQIHKETCTGQADPTPSEFNSQDSVEVTVDRPLEKPSCSLGIKGSNAPIQVSAPQPPSLTHQNSISSHPLVSCTGLSQSSDQTSNPVTVNMTVSSSSYGSQPPVPPLMTEYPQEQLTSMTSAIPNPQVQEPLSKPSHESRKDSAKRTVQDDLLLNSAKRQKHCQPAPLRLESMPLMSRTPDNIPDQTQMMASQITPNSSNSVVPVSNPAHGDGLARLFPPSNNFVAPPLRQTDVQCNSQPSVAEQQQQQQTQAGQHLQALQQHVPPQGVSHLHTNHLYIKQQQQAGQLRERHHLYQLQHHVPHADSAVHSQPHIVHQQRTLQQEVQMQKKRNLVQGTPTSQLSLQPKHHGTDQSRPKSSQPHPHHQQMQQQLQQHFASSQPEKSCENPSTNRGHHSHPQNHLNQDVLHQQQDVGSRQQGSDHVSGHNPMQRLLPSRGLEQQMVSQPSIVTRSSDMTCAPHRPERNRVSSYSAEALIGKSSSTSDQRMGISIQGSRVSDQLEMRSYLDVPRNKSLALHNMQGRMDHTVTSDIRLSDCQTFKPGGASQQPQSNFEVQSSRNNEIGNPVPSLRSMQSQAFRISQNTGPPPIDRQKRLSYPPVQSIPTGNAVPPRDSENTCHQSFMQSLLAPHLGDQVIGSQRSLSEHPRNTQCGPSSTIEYNCPPTRESVHIRRENESQNRESCDMSLGAINPRNSTLNIPFSSSSSSGDIQGRNTSPNVSVQKSNPMRITDSHGAKGHMNPPVTSNMHGVARPTLPHPSVSHGNADQGPPVRQANSSVAQRSRHPLQDSSGSKIRQPERNRSGNQRHSNVFDPSLPHLPLSTSGSMILGRQQPAAEKRGSIVRFMPDSPQVPNDNSGPDQHSLSQNFGFPFIPEGGMNPPINANTSFIPQVTQPSATRAPALIPVDPQNTLPSFYPPYSPAHPTLSNDISIPYFSNQMFSNPSTEKVNSGSLNNRFGSILSPPRPVGFAQPSFPLLPEMPPMHVANSHLSNFNMTSLFPEIAAALPDGSAMSPLLTIANSSASDSSKQPSNRPAHNISHILGHDCSSAV

SEQ ID NO: 592 - protein, 1516 aa, mus musculus
MEETAGSPARAEARVVSATLTWRQRPPVQEESRHRFHKVSLVSGTRMEAPQDVFEHSFRREEVNGFVKKEEETVNCQGSGEEPGSTNFQSHGPIFSKKYIPPPKEKRPTVRVQEAADWGDGGPQAPRTELPGMGSMARTELLVPLPGPREPSPHPHVGVASGGSRNREEWRVTRTVRTTTTTTVVGGHVDRRVSSSVSVGPSMSGETLPRGRNVTRTVRAVVVSPRAEGSPSRSQALEVLSNLMPAERIPPASRIPRLTMLTSRGSGPGGTVGTTLGQPLEISTTELKNSISALAPVGVPAVDRPAQNIDIPVAHPIRDQGGVSDARTEESSRLQGASSVLLPNQTSQSQVPASSSPKPQTCAASLTQSPEQPVVPAHLEAQSTPHVLPAVKEKFTGLSTVPVPPTAKGEVTVPEPPPSPSSPRRKAAPSSQSPCAPASPKSKFVPDPENVPSSALTQKEVYPCPSVPAHSHIPKEVLQAHGAPKTSSSRPTTVVQNAEGGPSIKKEVGQYPQNSPSPCSVPCKETVESPTFPAPLPPKQDEVVRDSPGNFLSSPTPKGSFQSPPFAPSSSEAKESLSLEGSPASKPMGAEVSTGSQPIPDSTEGKVPSEPSEEEDEAALTADLEIFLDTLRSMEPPEILRTHRLPRAPRSSYLAMYATLPAIEEDQLGPCVPGPGPQERPVLEEEEEEVEEEEEELENPYLSDDEKLRRRQEKAGPRPSLGLHPPTPAKVTCSPMEMMKKLIAGQGPEPQPSNRPTSRLGGSLLFGNLVPANKDAPALEPLGTKLSALPPHGAPGVRKVPGQLPLLCSGRPPPEKPAPIEPPEGWSPAPKTQGKLNTRPGKVILFSEPGCRGRGREVWGDIADASAWDPVASIRVIRGCWILYEQPEFRGQKLSLPEGDVELRALACAWSLQGFGSLRRAVQDYCTPRISLFSEEGLKGKPVTLTGDLKDSQGLERPLQVASATVTAGLWLLYPKPFFEDTPYILEPGEYPTLEAWGTSGPSVGSLKPMRLGCPSVEKPGEPKAVVYEAPGFQGQSWEVSGDIYNLQQPEDSQSPQLTSVGSLRILGGCWVGYEKEGFRGHQYLLEEGEYADWSHWGGYDELLTSLRVIRTDFGDPAVVLFEDMDFQGHRVEVSSALPDVELAQHGPSTQAIHVLSGVWVAYERVGFSGEQYILEKGVYRNCDDWGSGNCALGSLQPVVQVGESDLHFVTKIQLFSGPNFLGDHISFEDDQASLPASFHPQSCRVHGGSWVLFEDKNFEADQHIVSEGEFPTLTAMGCLASTVLGSLRKVPLHFSEPSLSLFGLECFEGKEIELTGEVRSLQAEGFNNHVLSVRVKGGVWVVCEHSDFRGRQWLVGSCEITNWLTYSGTQRVGSLYPIKQRRAYFRLWNAALGGFLSVPDHVEDMKAGRVVVSEPRAGGSCIWYYEDGLLKNQMAPTMSLQVIGPPSPGSKVVLWAESRLPRQTWSINELGHICSQMFEGQILDVKGGRGYDRDHVVLWEPTKDRLSQIWTVHVP

SEQ ID NO: 593 - protein, 2273 aa, mus musculus
MARFGEAVVVGRPGSGDGDSDQSRNRQGTPVPASGPAAAYKQSKAQRARTMALYNPIPVRQNCFTVNRSLFIFGEDNIVRKYAKKLIDWPPFEYMILATIIANCIVLALEQHLPEDDKTPMSRRLEKTEPYFIGIFCFEAGIKIVALGFIFHKGSYLRNGWNVMDFIVVLSGILATAGTHFNTHVDLRTLRAVRVLRPLKLVSGIPSLQIVLKSIMKAMVPLLQIGLLLFFAILMFAIIGLEFYSGKLHRACFMNNSGILEGFDPPHPCGVQGCPAGYECKDWIGPNDGITQFDNILFAVLTVFQCITMEGWTTVLYNTNDALGATWNWLYFIPLIIIGSFFVLNLVLGVLSGEFAKERERVENRRAFMKLRRQQQIERELNGYRAWIDKAEEVMLAEENKNSGTSALEVLRRATIKRSRTEAMTRDSSDEHCVDISSVGTPLARASIKSTKVDGASYFRHKERLLRISIRHMVKSQVFYWIVLSVVALNTACVAIVHHNQPQWLTHLLYYAEFLFLGLFLLEMSLKMYGMGPRLYFHSSFNCFDFGVTVGSIFEVVWAIFRPGTSFGISVLRALRLLRIFKITKYWASLRNLVVSLMSSMKSIISLLFLLFLFIVVFALLGMQLFGGRFNFNDGTPSANFDTFPAAIMTVFQILTGEDWNEVMYNGIRSQGGVSSGMWSAIYFIVLTLFGNYTLLNVFLAIAVDNLANAQELTKDEQEEEEAFNQKHALQKAKEVSPMSAPNMPSIERDRRRRHHMSMWEPRSSHLRERRRRHHMSVWEQRTSQLRRHMQMSSQEALNKEEAPPMNPLNPLNPLSPLNPLNAHPSLYRRPRPIEGLALGLGLEKCEEERISRGGSLKGDIGGLTSALDNQRSPLSLGKREPPWLPRSCHGNCDPIQQEAGGGETVVTFEDRARHRQSQRRSRHRRVRTEGKDSASASRSRSASQERSLDEGVSVEGEKEHEPHSSHRSKEPTIHEEERTQDLRRTNSLMVPRGSGLVGALDEAETPLVQPQPELEVEKDAALTEQEAEGSSEQALLGDVQLDVGRGISQSEPDLSCMTANMDKATTESTSVTVAIPDVDPLVDSTVVNISNKTDGEASPLKEAETKEEEEEVEKKKKQKKEKRETGKAMVPHSSMLIFSTTNPIRRACHYIVNLRYFEMCILLVIAASSIALAAEDPVLTNSERNKVLRYFDYVFTGVFTFEMVIKMIDQGLILQDGSYFRDLWNILDFVVVVGALVAFALANALGTNKGRDIKTIKSLRVLRVLRPLKTIKRLPKLKAVFDCVVTSLKNVFNILIVYKLFMFIFAVIAVQLFKGKFFYCTDSSKDTEKECIGNYVDHEKNKMEVKGREWKRHEFHYDNIIWALLTLFTVSTGEGWPQVLQHSVDVTEEDRGPSRSNRMEMSIFYVVYFVVFPFFFVNIFVALIIITFQEQGDKMMEECSLEKNERACIDFAISAKPLTRYMPQNRHTFQYRVWHFVVSPSFEYTIMAMIALNTVVLMMKYYSAPCTYELALKYLNIAFTMVFSLECVLKVIAFGFLNYFRDTWNIFDFITVIGSITEIILTDSKLVNTSGFNMSFLKLFRAARLIKLLRQGYTIRILLWTFVQSFKALPYVCLLIAMLFFIYAIIGMQVFGNIKLDEESHINRHNNFRSFFGSLMLLFRSATGEAWQEIMLSCLGEKGCEPDTTAPSGQNESERCGTDLAYVYFVSFIFFCSFLMLNLFVAVIMDNFEYLTRDSSILGPHHLDEFVRVWAEYDRAACGRIHYTEMYEMLTLMSPPLGLGKRCPSKVAYKRLVLMNMPVAEDMTVHFTSTLMALIRTALDIKIAKGGADRQQLDSELQKETLAIWPHLSQKMLDLLVPMPKASDLTVGKIYAAMMIMDYYKQSKVKKQRQQLEEQKNAPMFQRMEPSSLPQEIIANAKALPYLQQDPVSGLSGRSGYPSMSPLSPQEIFQLACMDPADDGQFQEQQSLVVTDPSSMRRSFSTIRDKRSNSSWLEEFSMERSSENTYKSRRRSYHSSLRLSAHRLNSDSGHKSDTHRSGGRERGRSKERKHLLSPDVSRCNSEERGTQADWESPERRQSRSPSEGRSQTPNRQGTGSLSESSIPSISDTSTPRRSRRQLPPVPPKPRPLLSYSSLMRHTGGISPPPDGSEGGSPLASQALESNSACLTESSNSLHPQQGQHPSPQHYISEPYLALHEDSHASDCGEEETLTFEAAVATSLGRSNTIGSAPPLRHSWQMPNGHYRRRRRGGPGPGMMCGAVSDLLSDTEEDDKC

SEQ ID NO: 594 - protein, 1010 aa, mus musculus
MSQLRLLPFRLGPRATKLLATRAIPVFSGCRRSSGPPTTIPRSRSGVSSSYVEEMYFAWLENPQSVHKSWDSFFQRASKEASVGPAQPQLPAVLQESRTSVSSCTKTSKLVEDHLAVQSLIRAYQIRGHHVAQLDPLGILDADLDSFVPSDLITTIDKLAFYDLQEADLDKEFRLPTTTFIGGPENTLSLREIIRRLESTYCQHIGLEFMFINDVEQCQWIRQKFETPGVMQFSVEEKRTLLARLVRSMRFEDFLARKWSSEKRFGLEGCEVMIPALKTIIDKSSEMGIENVILGMPHRGRLNVLANVIRKDLEQIFCQFDPKLEAADEGSGDVKYHLGMYHERINRVTNRNITLSLVANPSHLEAVDPVVQGKTKAEQFYRGDAQGRKVMSILVHGDAAFAGQGVVYETFHLSDLPSYTTNGTVHVVVNNQIGFTTDPRMARSSPYPTDVARVVNAPIFHVNADDPEAVIYVCSVAAEWRNTFNKDVVVDLVCYRRRGHNEMDEPMFTQPLMYKQIHKQVPVLKKYADKLIAEGTVTLQEFEEEIAKYDRICEEAYGRSKDKKILHIKHWLDSPWPGFFNVDGEPKSMTCPTTGIPEEMLTHIGSVASSVPLEDFKIHTGLSRILRGRADMTKKRTVDWALAEYMAFGSLLKEGIHVRLSGQDVERGTFSHRHHVLHDQEVDRRTCVPMNHLWPDQAPYTVCNSSLSEYGVLGFELGYAMASPNALVLWEAQFGDFHNTAQCIIDQFISTGQAKWVRHNGIVLLLPHGMEGMGPEHSSARPERFLQMSNDDSDAYPVFTEDFEVSQLYDCNWIVVNCSTPASYFHVLRRQILLPFRKPLIVFTPKSLLRHPDAKSSFDQMVSGTSFQRLIPEDGPAAHSPEQVQRLIFCTGKVYYDLVKERSSQGLEQQVAITRLEQISPFPFDLIMREAEKYSGAELVWCQEEHKNMGYYDYISPRFMTLLGHSRPIWYVGRDPAAAPATGNKNAHLVSLRRFLDTAFNLKAFEGKTF

SEQ ID NO: 595 - protein, 344 aa, mus musculus
MAALTRNPQFQKLLEWHRANSANLKLRELFEADPERFNNFSLNLNTNHGHILVDYSKNLVNKEVMQMLVELAKSRGVEAARDNMFSGSKINYTEDRAVLHVALRNRSNTPIKVDGKDVMPEVNRVLDKMKSFCQRVRSGDWKGYTGKSITDIINIGIGGSDLGPLMVTEALKPYSKGGPRVWFVSNIDGTHIAKTLASLSPETSLFIIASKTFTTQETITNAETAKEWFLEAAKDPSAVAKHFVALSTNTAKVKEFGIDPQNMFEFWDVSTGTLCCVLGVSFAESWPLSQQVRSAFIECLLHACPSPFGKGREALREAWSVGKFLVYEEKQYSLGSLPAAPSVR

SEQ ID NO: 596 - protein, 2477 aa, mus musculus
MDPSGVKVLETAEDIQERRQQVLDRYHRFKELSTLRRQKLEDSYRFQFFQRDAEELEKWIQEKLQVASDENYKDPTNLQGKLQKHQAFEAEVQANSGAIVKLDETGNLMISEGHFASETIRTRLMELHRQWELLLEKMREKGIKLLQAQKLVQYLRECEDVMDWINDKEAIVTSEELGQDLEHVEVLQKKFEEFQTDLAAHEERVNEVSQFAAKLIQEQHPEEELIKTKQDEVNAAWQRLKGLALQRQGKLFGAAEVQRFNRDVDETIGWIKEKEQLMASDDFGRDLASVQALLRKHEGLERDLAALEDKVKALCAEADRLQQSHPLSASQIQVKREELITNWEQIRTLAAERHARLDDSYRLQRFLADFRDLTSWVTEMKALINADELANDVAGAEALLDRHQEHKGEIDAHEDSFKSADESGQALLAASHYASDEVREKLSILSEERTALLELWELRRQQYEQCMDLQLFYRDTEQVDNWMSKQEAFLLNEDLGDSLDSVEALLKKHEDFEKSLSAQEEKITALDEFATKLIQNNHYAMEDVATRRDALLSRRNALHERAMHRRAQLADSFHLQQFFRDSDELKSWVNEKMKTATDEAYKDPSNLQGKVQKHQAFEAELSANQSRIDALEKAGQKLIDVNHYAKEEVAARMNEVISLWKKLLEATELKGIKLREANQQQQFNRNVEDIELWLYEVEGHLASDDYGKDLTNVQNLQKKHALLEADVAAHQDRIDGITIQARQFQDAGHFDAENIKKKQEALVARYEALKEPMVARKQKLADSLRLQQLFRDVEDEETWIREKEPIAASTNRGKDLIGVQNLLKKHQALQAEIAGHEPRIKAVTQKGNAMVEEGHFAAEDVKAKLSELNQKWEALKAKASQRRQDLEDSLQAQQYFADANEAESWMREKEPIVGSTDYGKDEDSAEALLKKHEALMSDLSAYGSSIQALREQAQSCRQQVAPMDDETGKELVLALYDYQEKSPREVTMKKGDILTLLNSTNKDWWKVEVNDRQGFVPAAYVKKLDPAQSASRENLLEEQGSIALRQGQIDNQTRITKEAGSVSLRMKQVEELYQSLLELGEKRKGMLEKSCKKFMLFREANELQQWITEKEAALTNEEVGADLEQVEVLQKKFDDFQKDLKANESRLKDINKVAEDLESEGLMAEEVQAVQQQEVYGAMPRDEADSKTASPWKSARLMVHTVATFNSIKELNERWRSLQQLAEERSQLLGSAHEVQRFHRDADETKEWIEEKNQALNTDNYGHDLASVQALQRKHEGFERDLAALGDKVNSLGETAQRLIQSHPESAEDLKEKCTELNQAWTSLGKRADQRKAKLGDSHDLQRFLSDFRDLMSWINGIRGLVSSDELAKDVTGAEALLERHQEHRTEIDARAGTFQAFEQFGQQLLAHGHYASPEIKEKLDILDQERTDLEKAWVQRRMMLDHCLELQLFHRDCEQAENWMAAREAFLNTEDKGDSLDSVEALIKKHEDFDKAINVQEEKIAALQAFADQLIAVDHYAKGDIANRRNEVLDRWRRLKAQMIEKRSKLGESQTLQQFSRDVDEIEAWISEKLQTASDESYKDPTNIQLSKLLSKHQKHQAFEAELHANADRIRGVIDMGNSLIERGACAGSEDAVKARLAALADQWQFLVQKSAEKSQKLKEANKQQNFNTGIKDFDFWLSEVEALLASEDYGKDLASVNNLLKKHQLLEADISAHEDRLKDLNSQADSLMTSSAFDTSQVKEKRDTINGRFQKIKSMATSRRAKLSESHRLHQFFRDMDDEESWIKEKKLLVSSEDYGRDLTGVQNLRKKHKRLEAELAAHEPAIQGVLDTGKKLSDDNTIGQEEIQQRLAQFVEHWKELKQLAAARGQRLEESLEYQQFVANVEEEEAWINEKMTLVASEDYGDTLAAIQGLLKKHEVFETDFTVHKDRVNDVCTNGQDLIKKNNHHEENISSKMKGLNGKVSDLEKAAAQRKAKLDENSAFLQFNWKADVVESWIGEKENSLKTDDYGRDLSSVQTLLTKQETFDAGLQAFQQEGIANITALKDQLLAAKHIQSKAIEARHASLMKRWTQLLANSATRKKKLLEAQSHFRKVEDLFLTFAKKASAFNSWFENAEEDLTDPVRCNSLEEIKALREAHDAFRSSLSSAQADFNQLAELDRQIKSFRVASNPYTWFTMEALEETWRNLQKIIKERELELQKEQRRQEENDKLRQEFAQHANAFHQWIQETRTYLLDGSCMVEESGTLESQLEATKRKHQEIRAMRSQLKKIEDLGAAMEEALILDNKYTEHSTVGLAQQWDQLDQLGMRMQHNLEQQIQARNTTGVTEEALKEFSMMFKHFDKDKSGRLNHQEFKSCLRSLGYDLPMVEEGEPDPEFEAILDTVDPNRDGHVSLQEYMAFMISRETENVKSSEEIESAFRALSSEGKPYVTKEELYQNLTREQADYCVSHMKPYVDGKGRELPTAFDYVEFTRSLFVN

SEQ ID NO: 597 - protein, 2643 aa, mus musculus
MPKGGCSKTPQQEDFALSNDMVEKQTGKKDKDKVSLTKTPKLDRSDGGKEVRERATKRKLPFTVGANGEQKDSDTEKQGPERKRIKKEPVARKSGLLFGMGLSGIRAGYPLSERQQVALLMQMTAEESANSPVDTTPKHPSQSTVCQKGTPNSASKTKDKVNKRNERGETRLHRAAIRGDARRIKELISEGADVNVKDFAGWTALHEACNRGYYDIAKQLLAAGAEVNTKGLDDDTPLRDAANNGHYKVVKLLLRYGGNPQQSNRKGETPLKVANSPTMVNLLLGKGTYTSSEESSTESSEEEDAPSFAPSSSVDGNNTDSEFEKGLKLKAKNPEPQKTVTPVKDEYEFDEDDEQDRVPPVDDKHLLKKDYRKEAKANSFISIPKMEVKSYSKNNTLAPKKAAHRILSDTSDEEDVSVSIGAGEKLRLSAHTMLPGSKARESSSSRQQKEKNKLKKKRKKETKGKEVRFGKRSDKFCSSGSESESSESEEDDGDSVGSSGCLKGSPLVLKDPSLFSSLSASSTSSHGSAVAQKHGSGHTDQHTKHWRTDNWKAISSPAWSEVSSLSDSSRTGLTSESDCSSEGSSVESLKPTRRKQEHRKRGVLQSAPSEKRSSFHPCTDGAVPKLDKEGKVVKKHKTKHKHKHKEKGQCSVSQELKLKSFTYEYEDSKQKSDKAILLESDLSTENKLKVLKHDREHLKKEDKLGRMKPEDKDWLFKDEKVLKRIKDANKDMSRAFREDKDRASKAERERATKDKSPKEEKLRLYKEERKKKSKDRASRLERKNDMKEDKLSKEKEKAFKEDKEKLKKEKLYREDAAFDDYCNKSQFLDHEDTKFSLSDDQQERWFSDLSDSSFDFKGEDSWDSVTDYRDIKNDSVAKLILETVKEDSKEKKRDNKIREKRDFKDSFFRKRDRDCLDKNSEKRRDQTEKHKSIPSYLSEKDKKRRESAEGGRDRRDGRIRSEEVHREDLKECGFESSFKDKSDCDFPKNLEPWERPHAAREKEKKDALEKERKEKGRADKYKEKSSERERSDKSTLDKCQKDKEFEKCFKEKKDGKEKHKDIHSKDRKASFDQLREKKEKVFSSIISEDFSERKDDRKGKEKSWYIADIFTDESEDEKDDCVAGSFKATEASDTQRVDGLPEKEEGREHPSDRHRKSSSDRQHTEKPRDKEPKEKKKDRGASEGGKDKKEKMEKIFEKHKEKKDKECAERYKDRKERASADSAPEKKNKQKLPEKVEKKHFAEDKVKSKHKEKPEKEHSRERERKPSRGPDVEKSLLEKLEEEALHDYREDSNDKISEVSSDSFADHGQEPSLSTLLEVSFSEPPAEDKARDSACLSEKLREKERHRHSSSSSKKSHERERAKKEKAEKKEKSEDYKDSISSVRKDASQFEKDFLDAETYGVSYPTKADVEEELDKAIELFSSEKKDRSDPEREPAKRIEKELKPYGSSAISILKEKKKREKHRERWREEKERHRDKHVDGFLRHHKDEPKPAAKDKDNPPNSFKEKSREESLKLSETKLKEKFKENTEREKGDSIKMSNGNDKLVPSRDSGKKDSRPREKLLGDGDLMMTSFERMLSQKDLEIEERHKRHKERMKQMEKMRHRSGDPKLKEKKPTEDGRKKSLDFPSKKALGLDKKVKEPAPTLTTGESKPHSGPGTESKDWLSGQPLKEVLPASPRTEQSRPTGVPTPTSVVSCPSYEEVMHTPRTPSCSADDYPDLVFDCTDSQHSMPVSTASTSACSPPFFDRFSVASSVVSENAAGQTPTRPISTNLYRSISVDIRRTPEEEFSAGDKLFRQQSVPAPSSFDSPVQHLLEEKAPLPPVPAEKFACLSPGYYSPDYGIPSPKVDTLHCPPTAVVSATPPPDSVFSNLPPKSSPSPRGELLSPAIEGTLPPDLGLPLDATEDQQATAAILPQEPSYLEPLDEGPFTTVITEEPVEWTHTAAEQGLSSSSLIASASENPVSWPVGSELMLKSPQRFAESPKHFCPGESLHSTTPGPYSAAEPTYPVSPGSYPLPAPEPALEEVKDGGTGAIPVAISAAEGAAPYAAPARLESFFSNCKSHPDAPLDTAPEPTGVTAVAQVEALGPLESSFLDSNPSISTLSQVEPVSWHEAFTSPEDDLDLGPFSLPELPLQAKDASDVEAEAAKASPVPPAESPPGPTGVLGGGDVPAPAAEEPPAPPPQEASPQLSTEPEPSEEPKLDVVLEATVETEVLADDSAPEASISNSVPAPSPPQQQPPGGGDEEAETEDPSATPCCAPDGPTTDGLAQAHNSAEASCVVAAAEGPPGNVQAEATDPEPKPTSEVPKAPKVEEVPQRMTRNRAQMLASQSKQGIPAAEKDPMPTPASRAKGRASEEEDAQAQHPRKRRFQRSSQQLQQQLNTSTQQTREVIQQTLAAIVDAIKLDAIEPYHSDRSNPYFEYLQIRKKIEEKRKILCCITPQAPQCYAEYVTYTGSYLLDGKPLSKLHIPVIAPPPSLAEPLKELFKQQEAVRGKLRLQHSIEREKLIVSCEQEILRVHCRAARTIANQAVPFSACTMLLDSEVYNMPLESQGDENKSVRDRFNARQFISWLQDVDDKYDRMKTCLLMRQQHEAAALNAVQRMEWQLKAQELDPAGHKSLCVNEVPSFYVPMVDVNDDFVLLPA

SEQ ID NO: 598 - protein, 438 aa, mus musculus
MKETPLSNCERRFLLRAIEEKKRLDGRQTYDYRNIRISFGTDYGCCIVELGKTRVLGQVSCELVSPKLNRATEGILFFNLELSQMAAPAFEPGRQSDLLVKLNRLLERCLRNSKCIDTESLCVVAGEKVWQIRVDLHLLNHDGNIIDAASIAAIVALCHFRRPDVSVQGEEVTLYTPEERDPVPLSIHHMPICVSFAFFQQGTYLLVDPNEREERVMDGLLVIAMNKHREICTIQSSGGIMLLKDQVFRCSKIAGVKVAEITELIQKALENDQRVRKEGGKFGFAESIANQRITAFKMEKAPIDTSNIEERAEEIIAEAEPPPEVVSQPVLWTPGTAQIGDGIENSWGDLEDSEKEEEEEEGGIDEAVILDDTKMDTGEVSDIGSQGAPIVLSDSEEEEMIILEPEKNPKKIRAQTSANQKAPSKGQGKRKKKKRTAN

SEQ ID NO: 599 - protein, 923 aa, mus musculus
MAPKPPKSPKGQKKGKKNMKQQLLVPEEEEPMNMESMGHPEIYPLVLTTKTQEIFNCRVDEDMTDEQTYKLIKKEDILADLQNRAAVSDFHPVKKIVREYPGEELLLVYDKDFKYGLNFYLIGTEDGKENFLKPPEVPEEQEEPKEHVQEDVYVYNPPVSKPWVSLGSEKEIEEESVQESGKRVTYMISRKRSEFGAPVTFSDQNASSVKDAYIECTSYPEKNYTLSQVEKDVGLQVIAEVKDTSTQTKWAFPKNATTQYYPREFSEEEKSLIGKSKSLVDFFNNVSTSVEVALQQNEIMNTFIDDWKNLAEEESTFGDKTDTHLKEYQSFTDLHNTMEKMITCVSWHPTIFGLIVVSVAVRLSYEERVQNSGRLLLQPSLLLFWSFSDPIHPQLMLESPDDIFCFEFCPSDPNIIAGGCINGQIVLWDITAHADRIENIKTGGHRSKKTSLKPMFLLEPDSNKESMYIRHCAVSSIENGHRKVITDIHWLPDSFEINRMGSVFENRSGINCQLVTCSADCTICFWDIRPQKPAVTAAAAASAATTATNNANSQQSPVEKKKEENIDIPFDVPSTFLHLDLSWKPLSRLKLSKGDTSLDHCPTKLSLGEDPFLCKIQGTSSIHIILRDKMLSQIKMVKTSEINPYQNLEAGIANILKPIEDFCTKFFVGTEEGEVIYTDWKMERDSDTGRLMAKKPVSLYTVHDGAVHTIQRSPFFNDIVLTVGGWNVAIWKEEVMTGPLLQTCCGPKRYTAGHWSLTRPGVFYIGREDGNVDIWDLLEKTHEPAQSQNICITMITYIKPWTFSSKQQFIAVADYYGTLHILEIPWTLSHPSLNEVSSVNYYFEREVRHLEYVQQRKEIREQEKIDMALELVKKKAKIYQKTKEQMEAELKLEYESYLDLEKSVLFALGLSKVSEKKSYLDSH

SEQ ID NO: 600 - protein, 206 aa, mus musculus
MAAARASLGRILPESSILFLCDLQEKFRPSIAYFPQIVSVAARMLKVARLLDVPILLTEQYPEGLGPTVPELGAQGIRPVSKTCFSMVPALQKELDGRSQLQSVLLCGIETQACILNTALDLLHRGLQVHVVVDACSSRSQVDRLVALARMRQSGAFLATSESLILQLVRDASHPQFKEIQKIIKEPVPDSGLLGLFQGQSPLTSC

SEQ ID NO: 601 - protein, 149 aa, mus musculus
KSEGEVARCKQLICDPSYIPDRVQKAGQVIRIICILSHPIKNTNDANSCQIIIPQNQVNRKSEPEKEVEPALELLEPIDQKFVAISDLYEPIDDGSESQVFCSCSYDATTHFETTCNDIKDIYKRMAGSAFDFENMKRKQNDVFGEADQ

SEQ ID NO: 602 - protein, 463 aa, mus musculus
MGKEKTHINIVVIGHVDSGKSTTTGHLIYKCGGIDKRTIEKFEKEAAEVGKGSFKYAWVLDKLKAERERGITIDISLWKFETTKYYITIIDAPGHRDFIKNMITGTSQADCAVLIVAAGVGEFEAGISKNGQTREHALLAYTLGVKQLIVGVNKMDSTEPAYSEKRYDEIVKEVSAYIKKIGYNPATVPFVPISGWHGDNMLEPSPNVPWFKGWKVERKEGNASGVSLLEALDTILPPTRPTDKPLRLPLQDVYKIGGIGTVPVGRVETGILRPGMVVTFAPVNITTEVKSVEMHHEALSEALPGDNVGFNVKNVSVKDIRRGNVCGDSKADPPQEAAQFTSQVIILNHPGQISAGYSPVIDCHTAHIACKFAELKEKIDRRSGKKLEDNPKSLKSGDAAIVEMVPGKPMCVESFSQYPPLGRFAVRDMRQTVAVGVIKNVEKKSGGAGKVTKSAQKAQKAGK

SEQ ID NO: 603 - protein, 381 aa, mus musculus
MSTGLRYKSKLATPEDKQDIDKQYVGFATLPNQVHRKSVKKGFDFTLMVAGESGLGKSTLVHSLFLTDLYKDRKLLSAEERINQTVEILKHTVDIEEKGVKLKLTIVDTPGFGDAVNNSECWKPITDYVDQQFEQYFRDESGLNRKNIQDNRVHCCLYFISPFGHGLRPVDVGFMKALHEKVNIVPLIAKADCLVPSEIRKLKDRIREEIDKFGIHVYQFPECDSDEDEDFKQQDRELKTRLGWVLAPLPQESAPFAVIGSNTVVEAKGQRVRGRLYPWGIVEVENQAHCDFVKLRNMLIRTHMHDLKDVTCDVHYENYRAHCIQQMTSKLTQDSRMESPIPILPLPTPDAETEKLIRMKDEELRRMQEMLQKMKQQMQDQ

SEQ ID NO: 604 - protein, 232 aa, mus musculus
ALSLSSPRSWQQVPLSVHNERRPLQVERLEAKVISPLKLYGAQIKQTRADIKKCKRVQNNEIKQLEKLEKLRQKSPSDRQMISQAETSAQRASVDTNRSTLHLVETVDAFQEQKLKDLRRIFSDFVTIEMVFHAKAVEVYSSAFQTLENYDLERDLQDFRAKTRGIYGHGEARPLTDTNPAPSVPWPLASQSAQSTMARQGKEAGGEEDSETDSVEEIPLEDLKGQQQGPRD

SEQ ID NO: 605 - protein, 2457 aa, mus musculus
MDPSGVKVLETAEDIQERRQQVLDRYHRFKELSTLRRQKLEDSYRFQFFQRDAEELEKWIQEKLQVASDENYKDPTNLQGKLQKHQAFEAEVQANSGAIVKLDETGNLMISEGHFASETIRTRLMELHRQWELLLEKMREKGIKLLQAQKLVQYLRECEDVMDWINDKEAIVTSEELGQDLEHVEVLQKKFEEFQTDLAAHEERVNEVSQFAAKLIQEQHPEEELIKTKQDEVNAAWQRLKGLALQRQGKLFGAAEVQRFNRDVDETIGWIKEKEQLMASDDFGRDLASVQALLRKHEGLERDLAALEDKVKALCAEADRLQQSHPLSASQIQVKREELITNWEQIRTLAAERHARLDDSYRLQRFLADFRNLTSWVTEMKALINADELANDVAGAEALLDRHQEHKGEIDAHEDSFKSADESGQALLAASHYASDEVREKLSILSEERTALLELWELRRQQYEQCMDLQLFYRDTEQVDNWMSKQEAFLLNEDLGDSLDSVEALLKKHEDFEKSLSAQEEKITALDEFATKLIQNNHYAMEDVATRRDALLSRRNALHERAMHRRAQLADSFHLQQFFRDSDELKSWVNEKMKTATDEAYKDPSNLQGKVQKHQAFEAELSANQSRIDALEKAGQKLIDVNHYAKEEVAARMNEVISLWKKLLEATELKGIKLREANQQQQFNRNVEDIELWLYEVEGHLASDDYGKDLTNVQNLQKKHALLEADVAAHQDRIDGITIQARQFQDAGHFDAENIKKKQEALVARYEALKEPMVARKQKLADSLRLQQLFRDVEDEETWIREKEPIAASTNRGKDLIGVQNLLKKHQALQAEIAGHEPRIKAVTQKGNAMVEEGHFAAEDVKAKLSELNQKWEALKAKASQRRQDLEDSLQAQQYFADANEAESWMREKEPIVGSTDYGKDEDSAEALLKKHEALMSDLSAYGSSIQALREQAQSCRQQVAPMDDETGKELVLALYDYQEKSPREVTMKKGDILTLLNSTNKDWWKVEVNDRQGFVPAAYVKKLDPAQSASRENLLEEQGSIALRQGQIDDQYQSLLELGEKRKGMLEKSCKKFMLFREANELQQWITEKEAALTNEEVGADLEQVEVLQKKFDDFQKDLKANESRLKDINKVAEDLESEGLMAEEVQAVQQQEVYGAMPRDEADSKTASPWKSARLMVHTVATFNSIKELNERWRSLQQLAEERSQLLGSAHEVQRFHRDADETKEWIEEKNQALNTDNYGHDLASVQALQRKHEGFERDLAALGDKVNSLGETAQRLIQSHPESAEDLKEKCTELNQAWTSLGKRADQRKAKLGDSHDLQRFLSDFRDLMSWINGIRGLVSSDELAKDVTGAEALLERHQEHRTEIDARAGTFQAFEQFGQQLLAHGHYASPEIKEKLDILDQERTDLEKAWVQRRMMLDHCLELQLFHRDCEQAENWMAAREAFLNTEDKGDSLDSVEALIKKHEDFDKAINVQEEKIAALQAFADQLIAVDHYAKGDIANRRNEVLDRWRRLKAQMIEKRSKLGESQTLQQFSRDVDEIEAWISEKLQTASDESYKDPTNIQLSKLLSKHQKHQAFEAELHANADRIRGVIDMGNSLIERGACAGSEDAVKARLAALADQWQFLVQKSAEKSQKLKEANKQQNFNTGIKDFDFWLSEVEALLASEDYGKDLASVNNLLKKHQLLEADISAHEDRLKDLNSQADSLMTSSAFDTSQVKEKRDTINGRFQKIKSMATSRRAKLSESHRLHQFFRDMDDEESWIKEKKLLVSSEDYGRDLTGVQNLRKKHKRLEAELAAHEPAIQGVLDTGKKLSDDNTIGQEEIQQRLAQFVEHWKELKQLAAARGQRLEESLEYQQFVANVEEEEAWINEKMTLVASEDYGDTLAAIQGLLKKHEAFETDFTVHKDRVNDVCTNGQDLIKKNNHHEENISSKMKGLNGKVSDLEKAAAQRKAKLDENSAFLQFNWKADVVESWIGEKENSLKTDDYGRDLSSVQTLLTKQETFDAGLQAFQQEGIANITALKDQLLAAKHIQSKAIEARHASLMKRWTQLLANSATRKKKLLEAQSHFRKVEDLFLTFAKKASAFNSWFENAEEDLTDPVRCNSLEEIKALREAHDAFRSSLSSAQADFNQLAELDRQIKSFRVASNPYTWFTMEALEETWRNLQKIIKERELELQKEQRRQEENDKLRQEFAQHANAFHQWIQETRTYLLDGSCMVEESGTLESQLEATKRKHQEIRAMRSQLKKIEDLGAAMEEALILDNKYTEHSTVGLAQQWDQLDQLGMRMQHNLEQQIQARNTTGVTEEALKEFSMMFKHFDKDKSGRLNHQEFKSCLRSLGYDLPMVEEGEPDPEFEAILDTVDPNRDGHVSLQEYMAFMISRETENVKSSEEIESAFRALSSEGKPYVTKEELYQNLTREQADYCVSHMKPYVDGKGRELPTAFDYVEFTRSLFVN

SEQ ID NO: 606 - protein, 344 aa, mus musculus
MAALTRNPQFQKLLEWHRANSANLKLRELFEADPERFNNFSLNLNTNHGHILVDYSKNLVNKEVMQMLVELAKSRGVEAARDNMFSGSKINYTENRAVLHVALRNRFNTPIKVDGKDVMPEVNRVLDKMKSFCQRVRSGDWKGYTGKSITDIINIGIGGSDLGPLMVTEALKPYSKGGPRVWFVSNIDGTHIAKTLASLSPETSLFIIASKTFTTQETITNAETAKEWFLEAAKDPSAVAKHFVALSTNTAKVKEFGIDPQNMFEFWDVSTGTLCCVLGVSFAESWPLSQQVRSAFIECLLHACPSPFGKGREALREAWSVGKFLVYEEKQYSLGSLPAAPSVR

SEQ ID NO: 607 - protein, 1058 aa, mus musculus
MSSSPLSKKRRVSGPDPKPGSNCSPAQSALSEVSSVPTNGMAKNGSEADIDESLYSRQLYVLGHEAMKMLQTSSVLVSGLRGLGVEIAKNIILGGVKAVTLHDQGTTQWADLSSQFYLREEDIGKNRAEVSQPRLAELNSYVPVTAYTGPLVEDFLSSFQVVVLTNSPLEAQLRVGEFCHSRGIKLVVADTRGLFGQLFCDFGEEMVLTDSNGEQPLSAMVSMVTKDNPGVVTCLDEARHGFETGDFVSFSEVQGMIQLNGCQPMEIKVLGPYTFSICDTSNFSDYIRGGIVSQVKVPKKISFKSLPASLVEPDFVMTDFAKYSRPAQLHIGFQALHQFCALHNQPPRPRNEEDATELVGLAQAVNARSPPSVKQNSLDEDLIRKLAYVAAGDLAPINAFIGGLAAQEVMKACSGKFMPIMQWLYFDALECLPEDKEALTEEKCLPRQNRYDGQVAVFGSDFQEKLSKQKYFLVGAGAIGCELLKNFAMIGLGCGEGGEVVVTDMDTIEKSNLNRQFLFRPWDVTKLKSDTAAAAVRQMNPYIQVTSHQNRVGPDTERIYDDDFFQNLDGVANALDNIDARMYMDRRCVYYRKPLLESGTLGTKGNVQVVIPFLTESYSSSQDPPEKSIPICTLKNFPNAIEHTLQWARDEFEGLFKQPAENVNQYLTDSKFVERTLRLAGTQPLEVLEAVQRSLVLQRPQTWGDCVTWACHHWHTQYCNNIRQLLHNFPPDQLTSSGAPFWSGPKRCPHPLTFDVNNTLHLDYVMAAANLFAQTYGLTGSQDRAAVASLLQSVQVPEFTPKSGVKIHVSDQELQSANASVDDSRLEELKATLPSPDKLPGFKMYPIDFEKDDDSNFHMDFIVAASNLRAENYDISPADRHKSKLIAGKIIPAIATTTAAVVGLVCLELYKVVQGHQQLDSYKNGFLNLALPFFGFSEPLAAPRHQYYNQEWTLWDRFEVQGLQPNGEEMTLKQFLDYFKTEHKLEITMLSQGVSMLYSFFMPAAKLKERLDQPMTEIVSRVSKRKLGRHVRALVLELCCNDESGEDVEVPYVRYTIR

SEQ ID NO: 608 - protein, 496 aa, mus musculus
MWQIIFLTFGWDLVLASAYSNFRKSVDSTGRRQYQVQNGPCSYTFLLPETDSCRSSSSPYMSNAVQRDAPLDYDDSVQRLQVLENILENNTQWLMKLENYIQDNMKKEMVEIQQNVVQNQTAVMIEIGTSLLNQTAAQTRKLTDVEAQVLNQTTRLELQLLQHSISTNKLEKQILDQTSEINKLQNKNSFLEQKVLDMEGKHSEQLQSMKEQKDELQVLVSKQSSVIDELEKKLVTATVNNSLLQKQQHDLMETVNSLLTMMSSPNSKSSVAIRKEEQTTFRDCAEIFKSGLTTSGIYTLTFPNSTEEIKAYCDMDVGGGGWTVIQHREDGSVDFQRTWKEYKEGFGSPLGEYWLGNEFVSQLTGQHRYVLKIQLKDWEGNEAHSLYDHFYLAGEESNYRIHLTGLTGTAGKISSISQPGSDFSTKDSDNDKCICKCSQMLSGGWWFDACGPSNLNGQYYPQKQNTNKFNGIKWYYWKGSGYSLKATTMMIRPADF

SEQ ID NO: 609 - protein, 1048 aa, mus musculus
MALYDEDLLKNPFYLALQKWRPDLCSKVAQIHGIVLVPCRGSLPGSVQASCQFESYVLVPTEGHFQTLDGKAVIIEGNRIKLGAGFACLLSVPILFEETFYNEKEESFSILCIAHPLERRETSEEPSAPADPFSLKTIEDVREFLGRHSEKFDKNIASFHRTFRECERKSLRHHIDSVNALYTKCLQQLLRDSHLKVLAKQEAQMNLMKQAVEMYVHHDIYDLIFKYVGTMEASEDAAFNKITRSLQDLQQKDIGVKPEFSFNIPRAKRELGQLNKCTSPQQKLLCLRKVVQLMTQSPSQRVNLETMCADDLLSVLLYLLVKTEIPNWMANLSYIKNFRFSSSAKDELGYCLTSVEAAIEYIRQGSLSTKTPDAEGFGDRLFLKQRMNLLSQMTSTPIDCLFKHIASGNQKEVERLLSQDDQDKDAMQKMCHPLCSCEDCEKLISGRLNDPSVVTPFSRDDRGQTPLHVAALCGQASLIDFLVSKGAVVNATDYHGSTPLHLACQKGFQSVTLLLLHYKASTEVQDNNGNTPLHLACTYGQEDCVKALVYYDVQACRLDIGNEKGDTALHIAARWGYEGIIETLLQNGAPTAVQNRLKETPLKCALNSKILSIMEAHHLSSDRRPRPSEVPAQSPTRSVDSISQGSSTSSFSSISVSFRQEEVKKDYREVEKLLRAVADGDLEMVRYLLEWTEDDLDDVEDAISTVDLEFCHPLCQCPKCAPAQKLARIPANGLSVNVTNQDGFSPLHMAALHGRTDLVPLLLKHGAYSGARNTSQAVPLHLACQQGHFQVAKCLLDSNAKPNKKDLSGNTPLICACSAGHHEVAALLLQHGASINACNNKGNTALHEAVMGRHTLVVELLLFYGASVDILNKRQYTAADCAEQDSKIMELLQVVPGCVASLDSVEEADHEGYVTVEIRRKWNPKMYNLPEEPLRRQFCLINPGGRFQERTSRETMGRDRSVPDLAGRSLQEPEKQRVTGKQSDLSDLSRYQTSEEGNKGLPERPVSRQAAPGHRPMVRRHTVNDAAILQVPEVTVHLTTHEASVPQS

SEQ ID NO: 610 - protein, 184 aa, mus musculus
MREYKLVVIGSGGVGKSALTVQFVQGIFVEKYDPMIEDSYRKQVEVDCQQCMLEILDTAGTEQFTAMRDLYMKNGQGFALVYSITAQSTFNDLQDVREQILRVKDTEDVPMILVGNKCDLEDERVVGKEQGQNLARQWCNCAFLESSAKSKINVNEIFYDLVRQINRKTPVEKKKPKKKSCLLL

SEQ ID NO: 611 - protein, 642 aa, mus musculus
MMAEGTRLQRELRGYLAAIKGMQEASMKLTESLHEVYEPDWYGREDVKMVGEKCDVLWEDFHQKLVDGSLLTLDTYLGQFPDIKNRIAKRSRKLVDYDSARHHLEALQSSKRKDESRISKAEEEFQKAQKVFEEFNVDLQEELPSLWSSRVGFYVNTFKNVSSLEAKFHKEIAVLCHKLYEVMTKLGDQHADKAFSIQGAPSDSGPLRIAKTPSPPEEPSPLPSPTASPNHTLAPASPAPVRPRSPSQTRKGPPVPPLPKVTPTKELKQENIINFFEDNFVPEINVTTPSQNEVLEVKKEETLLDLDFDPFKPDVAPAGSAAATHSPMSQTLPWDLWTTSTDLVQPASGGSFNDFTQAQDTSLFTMQTDQNMVGGLAETEQALPTEPQAEEPPATAAAPTAGLDLGLEMEEPKEEAVIPPATDTGETVETAVPTEGAPVEEAEAEKAALPAGEGGSPEGAKIDGESTELAISESPQPVEPEAGAPQVIPSVVIEPASNHEGEGEHQETATGTEPREAAEDVAAQGSAGEKQEVATEPTPLDSQATLPASAGAVDASLSAGDATQELPPGFLYKVETLHDFEAANSDELNLQRGDVVLVVPSDSEADQDAGWLVGVKESDWLQYRDLATYKGLFPENFTRRLE

SEQ ID NO: 612 - protein, 200 aa, mus musculus
MKPYFCRVFVFCFLIRLLTGEINGSADHRMFSFHNGGVQISCKYPETVQQLKMRLFRERDVLCELTKTKGSGNAVSIKNPMLCLYHLSNNSVSFFLNNPDSSQGSYYFCSLSIFDPPPFQERNLSGGYLHIYESQLCCQLKLWLPVGCAAFVVVLLFGCILIIWFSKKKYGSSVHDPNSEYMFMAAVNTNKKSRLAGVTS

SEQ ID NO: 613 - protein, 380 aa, mus musculus
MPGLVDTHIHAPQYAFAGSNVDLPLLEWLNKYTFPTEQRFRSTDVAEEVYTRVVRRTLKNGTTTACYFGTIHTDSSLILAEITDKFGQRAFVGKVCMDLNDTVPEYKETTEESVKETERFVSEMLQKNYPRVKPIVTPRFTLSCTETLMSELGNIAKTHDLYIQSHISENREEIEAVKSLYPSYKNYTDVYDKNNLLTNKTVMAHGCYLSEEELNIFSERGASIAHCPNSNLSLSSGLLNVLEVLKHKVKIGLGTDVAGGYSYSMLDAIRRAVMVSNVLLINKVNEKNLTLKEVFRLATLGGSQALGLDSEIGNFEVGKEFDALLINPRASDSPIDLFYGDFVGDISEAVIQKFLYLGDDRNIEEVYVGGKQVVPFSSSV

SEQ ID NO: 614 - protein, 2070 aa, mus musculus
MLKFKYGVRNPPEASASEPIASRASRLNLFFQGKPPLMTQQQMSALSREGMLDALFALFEECSQPALMKMKHVSSFVQKYSDTIAELRELQPSARDFEVRSLVGCGHFAEVQVVREKATGDVYAMKIMKKKALLAQEQVSFFEEERNILSRSTSPWIPQLQYAFQDKNNLYLVMEYQPGGDLLSLLNRYEDQLDESMIQFYLAELILAVHSVHQMGYVHRDIKPENILIDRTGHIKLVDFGSAAKMNSNKVDAKLPIGTPDYMAPEVLTVMNEDRRGTYGLDCDWWSVGVVAYEMVYGKTPFTEGTSARTFNNIMNFQRFLKFPDDPKVSSELLDLLQSLLCVQKERLKFEGLCCHPFFARTDWNNIRNSPPPFVPTLKSDDDTSNFDEPEKNSWVSSSVCQLSPSGFSGEELPFVGFSYSKALGYLGRSESVVSSLDSPAKVSSMEKKLLIKSKELQDSQDKCHKMEQEMTRLHRRVSEVEAVLSQKEVELKASETQRSLLEQDLATYITECSSLKRSLEQARMEVSQEDDKALQLLHDIREQSRKLQEIKEQEYQAQVEEMRLMMNQLEEDLVSARRRSDLYESELRESRLAAEEFKRKANECQHKLMKAKDQGKPEVGEYSKLEKINAEQQLKIQELQEKLEKAVKASTEATELLQNIRQAKERAERELEKLHNREDSSEGIKKKLVEAEERRHSLENKVKRLETMERRENRLKDDIQTKSEQIQQMADKILELEEKHREAQVSAQHLEVHLKQKEQHYEEKIKVLDNQIKKDLADKESLENMMQRHEEEAHEKGKILSEQKAMINAMDSKIRSLEQRIVELSEANKLAANSSLFTQRNMKAQEEMISELRQQKFYLETQAGKLEAQNRKLEEQLEKISHQDHSDKSRLLELETRLREVSLEHEEQKLELKRQLTELQLSLQERESQLTALQAARAALESQLRQAKTELEETTAEAEEEIQALTAHRDEIQRKFDALRNSCTVITDLEEQLNQLTEDNAELNNQNFYLSKQLDEASGANDEIVQLRSEVDHLRREITEREMQLTSQKQTMEALKTTCTMLEEQVLDLEALNDELLEKERQWEAWRSVLGDEKSQFECRVRELQRMLDTEKQSRARADQRITESRQVVELAVKEHKAEILALQQALKEQKLKAESLSDKLNDLEKKHAMLEMNARSLQQKLETERELKQRLLEEQAKLQQQMDLQKNHIFRLTQGLQEALDRADLLKTERSDLEYQLENIQVLYSHEKVKMEGTISQQTKLIDFLQAKMDQPAKKKKGLFSRRKEDPALPTQVPLQYNELKLALEKEKARCAELEEALQKTRIELRSAREEAAHRKATDHPHPSTPATARQQIAMSAIVRSPEHQPSAMSLLAPPSSRRKESSTPEEFSRRLKERMHHNIPHRFNVGLNMRATKCAVCLDTVHFGRQASKCLECQVMCHPKCSTCLPATCGLPAEYATHFTEAFCRDKMNSPGLQSKEPGSSLHLEGWMKVPRNNKRGQQGWDRKYIVLEGSKVLIYDNEAREAGQRPVEEFELCLPDGDVSIHGAVGASELANTAKADVPYILKMESHPHTTCWPGRTLYLLAPSFPDKQRWVTALESVVAGGRVSREKAEADAKLLGNSLLKLEGDDRLDMNCTLPFSDQVVLVGTEEGLYALNVLKNSLTHIPGIGAVFQIYIIKDLEKLLMIAGEERALCLVDVKKVKQSLAQSHLPAQPDVSPNIFEAVKGCHLFAAGKIENSLCICAAMPSKVVILRYNDNLSKYCIRKEIETSEPCSCIHFTNYSILIGTNKFYEIDMKQYTLDEFLDKNDHSLAPAVFASSSNSFPVSIVQANSAGQREEYLLCFHEFGVFVDSYGRRSRTDDLKWSRLPLAFAYREPYLFVTHFNSLEVIEIQARSSLGSPARAYLEIPNPRYLGPAISSGAIYLASSYQDKLRVICCKGNLVKESGTEQHRVPSTSRSSPNKRGPPTYNEHITKRVASSPAPPEGPSHPREPSTPHRYRDREGRTELRRDKSPGRPLEREKSPGRMLSTRRERSPGRLFEDSSRGRLPAGAVRTPLSQVNKVWDQSSV

SEQ ID NO: 615 - protein, 270 aa, mus musculus
QPSKMPKGKKAKGKKVAPTPAVVKKQEAKKVVNPLFEKRPKNFGIGQDIQPKRDLTRFVKWPRYIRLQRQRAILYKRLKVPPAINQFTQALDRQTATQLLKLAHKYRPETKQEKKQRLLARAEKKAAGKGDVPTKRPPVLRAGVNTVTTLVENKKAQLVVIAHDVDPIELVVFLPALCRKIGVPYCIIKGKARLGHLVHRKTCTTVAFTQVNSEDKGALAKLVEAIRTNYNDRYDEIRRHWGGNVLGPKSVARIAKLENAKAKELTTNLG

SEQ ID NO: 616 - protein, 193 aa, mus musculus
MATRRPDGSSFNMTRLSLALAFSFPPVASEQPHSELGNTQQQTELGKESTATGTMPHPYPALTPEQKKELSDIAHRIVAPGKGILAADESTGSIAKRLQSIGTENTEENRRFYRQLLLTADDRVNPCIGGVILFHETLYQKADDGRPFPQVIKSKGGVVGIKVDKGVVPLAGTNGETTTQGLDGLSERCAQYK

SEQ ID NO: 617 - protein, 121 aa, mus musculus
MSIEKIWAREILDSRGNPTVEVDLYTAKGLFRAAVPSGASTGIYEALELRDGDKQRYLGKGVLKAVDHINSRIAPALISSGISVVEQEKLDNLMLELDGTENKSLELVKEAIDKAGYTEKM

SEQ ID NO: 618 - protein, 508 aa, mus musculus
MPAHIEEELPPPSPRPSNPEDGELYSQYNVVRTIGHGTYAKVFLAQHWLTGTPVAVKVLVKNKPWFQPGMKEANLMKKIKHPNIVSLLQVIETKTRGYLIMELVEGQELYEYIKNSGHIEEDEARQIFLQILSAVSYCHRHGIVHRDLKPDNIMIDNKGSIKIIDFGLSTQFKPGDLLDEPCGAYAFRAPELFLWERYDGRKSDLWALGVILYYMVVGKVPFDSVTIPELQRQILAGVYPAPCGVSDELEDLLSLLMTVNPKYRPTVTEVMKHPWLKGHWKGLKNIHEEPSPVRPDPDIVDVMQYIGFQAKDIRESLTKEKFNEMSAAYYLLERQALQREVRSTQAPTVSQVKAPFPSIDAGAASCLKIKRSGSAPNLGRSVWPSSIGQVPAYGQKVRQRAGRRSTGHGLVFRANQMTRTQDQHHIRAMSVPCMLSTSSISEESVSEKREENLSHSALAEDKPIHSRGWRRGIMRWTRRVGNAIRTLCCCIPSRKTPRLGQSRVSPQK

SEQ ID NO: 619 - protein, 241 aa, mus musculus
MAQQDRIQQEIAVQNPLVSERLELSVLYKEYAEDDNIYQQKIKDLHKKYSYIRKTRPDGNCFYRAFGFSHLEALLDDSKELQRFKAVSAKSKEDLVSQGFTEFTIEDFHNTFMDLIEQVEKQTSVADLLASFNDQSTSDYLVVYLRLLTSGYLQRESKFFEHFIEGGRTVKEFCQQEVEPMCKESDHIHIIALAQALSVSIQVEYMDRGEGGTTNPHVFPEGSEPKVYLLYRPGHYDILYK

SEQ ID NO: 620 - protein, 110 aa, mus musculus
MAGWQSYVDNLMCDGCCQEAAIVGYCDAKYVWAATAGGVFQSITPVEIDMIVGKDREGFFTNGLTLGAKKCSVIRDSLYVDGDCTMDIRTKSQGGEPTYNVAVGRAGRGE

SEQ ID NO: 621 - protein, 5634 aa, mus musculus
MIAQEVVHTVFLVALFRSSLAGDGTPQSESRAEEIPEGASTLAFVFDVTGSMYDDLVQVIEGASKILETSLKRPKRPLYNFALVPFHDPEIGPVTITTDPKKFQYELRELYVQGGGDCPEMSIGAIKIALEISLPGSFIYVFTDARSKDYRLTHEVLQLIQQKQSQVVFVLTGDCDDRNHIGYKVYEEIASTSSGQVFHLDKKQVNEVLKWVEEAVQASKVHLLSTDHLEHAVNTWKIPFDPSLKEVTVSLSGPSPVIEIRNPFGKLIKKGFGLNELLNIHNSAKVVNVKEPEAGMWTVKTSSSGRHSVRITGLSTIDFRAGFSRKPTLDFKKTMSRPVQGIPTYVLLNTSGISSPARVDRLELLSISGGSLKTIPVKHYPDRKPYGIWNISDFIPPDEAFFLKVTGYDKDGYLFQRVSSVSFSSIVPDAPKVTMPTRTLGYYLQPGQILCSVESFLPFTLSFMRDGIALGVDQYLRESASVNWDFTKVTLSDEGFYDCIAVSSAGTGRAQTFFDVSEPPPIIQLPNNVTVTPGERAVLACLVISAVDYNLTWQRSGRDIRLADSARIRTLANLSLELRSVKIGDAGEYRCVVSSEGGSAAASVFLTVQEKPKVTVMPKNQSFTGGSEISIMCSATGYPKPKIVWTMNEMFIMGSHRYRMTSEGTLFIKNAVPKDAGTYACLASNAAGTDKQTSTLRYIEAPKLVVEQSELLVALGDTTVMECKTSGIPPPQVKWFKGDLELRPSTFLSIDPLVGLLKIQETQDLDAGDYTCVAINEAGRATGRLTLDVGSPPVFIQEPSDVAVEIGSNVTLPCYVQGYPEPKIKWRRLDNMPVFSRPFSVSFISQLRTGALFISNLWASDKGTYICEAENQFGKIQSQTTVTVTGLVAPLIGISPSMASVIEGQPLTLPCTLLAGNPIPERRWMKNSAMLVQNPYITVRSDGSLHIERVRLQDGGKYTCVASNVAGTNNKTTSVAVHVLPSIQHGQQILSTIEGVPVTLPCRASGIPKPSITWSKKGELISTSSAKFSAGADGSLYVVSPGSEESGEYICTATNAAGYAKRKVQLTVYVRPRVFGDQRGLSQDKPVEISVLAGEEAILPCEAKSLPPPIITWAKDSQLISPFSPRHTFLPSGSMKITETRVSDSGMYLCVATNIAGNVTQSVKLSVHVPPKIQHGNRHIKVQVGQRVDILCNAHGSPPPVITWFKSGRPFLDGAQHPGSPDGTLSIEQAVISDAGVYTCAATNIAGSDEAEVTLHVQEPPSVEDLQPPFNTPFQERLANQRIEFPCPAKGTPKPTIKWLHNGREVTGQEPGVSILEDGALLVIASVTPHNNGEYICVAVNEAGTTERKYNLKVHVPPVIRDKEHVTNVSVLTSQLASLYCEVEGTPSPVITWYKDDIQVTESSTVQIVNNGKILKLFKVSAEDAGRYSCKAINIAGTSQKDFSVNVLVPPSILGASSPSEVSVVLNHNVTLQCPGTGVPFPAIHWFKDGKPLFLGDPNIELSDRGQSLHLRNARRSDKGRYQCTVSNAAGKQAKDIKLTVYVPPSIKGGNITTEISALLNSIVKLECETRGLPVPAITWYKDGQVVTSSSQALYIDKGQLLHIQRAQVSDSATYTCHAANVAGTAEKSFHVDIYVPPTIEGDLTAPSNKQVIIGQSLILECKAAGNPPPILTWLKDGVPVKASDNIHIEAGGKKLEILSALEVDRGQYICVATSVAGEREIKYEVDVLVPPAVEGGEETSYFIVLANNLLELDCQVSGSPPPTIMWLKGGQLIDERDGFKILLNGRKLVIAQAQVSDTGLYQCVATNIAGDHRKEFEVTVHVPPTIKSSDLPEKTVVRYKPVTLQCIANGIPNPSITWLKDDQPVNTAHGNLKIQSSGRVLQIAKALLEDAGRYTCVATNAAGEAHQHTQLHVHEPPSLDDAGKMRNETVVVNNPIQLECKATGKPLPVITWYKDSHPLSGSASAAFLKRGQVLEIGSAQISDAGIYKCVAINSAGATELFYSLQVHVPPSISGSSSMVEVVVNNLARLECEARGIPAPSLTWLKDGSPVSSFSNGIQILSGGRILALTSAQMSDAGRYTCVAVNAAGEKQRDIDLRVYAPPNIMGEEQNVSVLIGQAVELFCQSDAVPPPTLMWLKDGRPLLKRPGLSISENGSVLKIEDAQAGDTGRYTCEATNVAGKTEKNYNVNVWVPPSIYGSDELVQLTAIEGNLITLLCESSGIPPPDLTWKKKGSLVLADSAGRVHILSGGRRLQISIAEKADAGLYTCVASNVAGVAKKEYNLQVYIRPSITNSGGHRPEITVIRGKSISLECEVQGIPQPTVTWMKDGRPLTKGKGVEILDEGRILQLKNVHVSDTGRYVCVAVNVAGMTDKRYDLSVHAPPSIIGNHGVPENVSVVEKSSVSLTCEASGIPLPSITWLKDGWPVNLGSSVKILSGGRMLRLMQTRPEDAGQYTCIVRNAAGEDRKMFGLSVLVPPHIVGENTLEDVKIKEKQSVTLTCEVRGNPVPQITWHKDGQLLQEDEAHHMMSGGRFLQITNAQVSHTGRYTCLASNIAGDKSKSFRLNVFVSPTIAGVDSDGSPEDVIVILNSPTSLVCEAYSYPPATITWFKDGTPLESNRNIRILPGGRTLQILNAQEDNAGRYSCVATNEAGEKIKHYEVKVYIPPIIKKGDLLGPGLSPKEVKIRVNSSLTLECEAYAIPSASLRWYKDGQPLKSDDHVTIAASGHTLQIKEAQISDTGRYTCVASNLAGEDELDFDVNIQVPPSFQKLWEIGNMLDTGRSGEAKDVIINNPLSLHCETNAAPPPTLTWYKDGRPLTSSDRVLILPGGRVLQIPRAKVEDAGRYTCVAVNEAGEDSLRYDVHVLLPPVIKGANSDLPEEVTVLVNKSTQMECSSSGNPAPRNYWQKDGQILLEDEHHKFQSDGRSLQILNAQITDTGRYVCVAENTAGSAKKYFNLNVHVPPSVIGPNHEHLSVVVNHFISLNCEVSGFPPPDLSWLKNEEPIKPNTNVLTVPGGRTLQIIRAKISDGGDYTCIAINQAGESKKKVSLTVHVPPSIKDHGSQSLSIVNVREGTSVSLECESNAVPPPVITWSKNGRMIPDSTNVEILTGGQTLHIRRAEVSDTGQYVCRAINVAGRDDKNFHLNVYVPPTIEGPETEVIVETISNPVTLTCDATGIPPPTITWLKNHKPIENSDPLEVHILSGGSKLQIARPQRSNSGNYTCVASNMEGKAQKNFILFIQVPPSVAGAEVPSEVSVLLGENVELVCNADGIPTPHLQWLRDGKPIVNGETERVRVTTDGSTLNIYRALTSDMGKYTCVATNPAGEEDRIFNLNVYVPPKIRGNKEEAEKLMALVDTSINIECKATGTPPPQINWLKNGLPLPISSHIRLLSAGQVVRIVRAQVSDIAVYTCVASNRAGVDSKHYSLQVFVPPNMDNAMGTEEITIVKGSSTSMTCFTDGTPAPSMSWLRDGQPLAPDAHLTVSTQGMVLQLIKAETEDTGKYTCVATNEAGEVSKHFVLKVLEPPHINGSEGPGEVSVIVNNPLELSCIASGIPAPKISWMKDGRPFLQTEQVQTLEGGAILRVSSAQVEDTGRYTCLASSPAGDDDKEYLVRVHVPPNIAGMDEAQDFTVLRNRQVTLECKSDAVPPPVIMWLKNREQLQATPRVRILSGGRYLQINNADLGDTANYTCVASNIAGKTTREFNLTVNVPPSIGGGPQSLVTLLNKSIALECRAEGVPAPRITWRKDGVVLAESHARYSILENGFLHIESAHVTDTGRYLCMATNVAGTDRRRIDLQVHVPPSIAMGPTNVTVTVNVQTTLACEATGIPKPSVTWRKNGHLLNVDQNQNSYRLLSSGSLVIISPSVDDTASYECTVTSDAGEDKRAVDLTVQVPPTIADEPMDFLVTRQAPAVMTCSASGVPVPSIHWTKNGLRLLPRGDGYRILSSGAIEIPTTQLNHAGRYTCVARNAAGSAHRHVTLRVQEPPVIQPQPSELDVILNNPILLPCEATGIPTPFITWQKEGINVITSGKSLAILPSGSLQISRAVRGDAGTYMCVAQNPAGTALGKVKLNVQVPPVISSHQKEYVVTMDKPVSLLCETEGSPPPDITWHKDGHALTESIRQRILNSGALQIAFAQPDDAGQYTCMAANMAGSSSVSSTLTVHVPPRIQSTEVHFTVNENSQAVLPCVADGIPTPAIHWEKDGVLIANLLGKYTAQPYGELILENVVLEDSGTYTCVANNAAGEDTRIVTLAVHTLPTFTELPGDLSLNKGEQLRLSCKAVGIPLPKLTWTFNNNIIPAHFDSINGHSELVIEKVSKEDSGTYVCTAENSVGFVKAIGFVYVKEPPVFKGDYPSNWIEPLGGNAILNCEVKGDPAPTIQWSRKGADIEISHRIRQLGNGSLAIYGTVNEDAGDYTCVAANEAGMVERSMSLTLQSSPIITLEPVETVVDAGGRVILDCQAAGEPQPTITWSRQGQPISWDNRLSMLPNSSLYIAAARKEDTSEYECVARNLMGSVLVRVPVIVQVHGGFSLWSAWRPCSVTCGKGIQKRSRLCDNPPPANGGRPCQGADSEARHCHNKLCPVDGHWSEWSFWEDCSRSCGHGNQTRTRTCSNPPAQHGGRPCEGHAVETIMCNIRPCPVHGVWNAWQPWSACSKSCGKGSQTRMRLCNNPPPSFGGAHCSGAETQMQVCNERHCPVDGRWATWSSWSACTVSCGGGARKRTRDCSDPVPQYGGNKCEGTGVQSDFCNSDPCPTHGNWSPWSGWGTCSRTCNGGQMRRYRTCDNPRPSNGGRACGGPDTQIQRCNTDMCPVDGSWGTWHSWSHCSVSCGGGERTRKRLCDNPVPTKGGRSCPGDATQVSRCNMQACPGGPQRARGSVIGNINDIEFGIAFLNATITDSPNTDTRVIQAKITNVPRSLGPAMRKIISILNPIYWTTAKEIGEAVNGFTLTNAVFKRETQVEFATGEVLRMTHVARGLDSDGALLLDVIVSGQVLQLHSPAEVGVKDYTEDYIQTGPGQLYAYSTRLFTIDGISIPYTWNHTIFYDQAWGKMPFLVETLHASSIESDYNQLEETLGFKIHASISKGDRSNQCPSGFILDSVGPFCADEDECTAGNPCSHTCHNAIGAYYCSCPKGLTIAADGRTCQDIDECALGGHTCRAGQDCDNTIGSYRCVVHCGTGFRRTSDGLSCQDINECQESSPCHQRCFNVIGSFHCGCEAGYQLKGRKCIDVNECRQNVCRPDQHCKNTRGGYKCIDLCPSGMTKAENGTCIDIDECKDGTHQCRYNQICENTRGSYRCACPRGYRSQGVGRPCIDINECEQVPKPCAHQCSNSPGSFKCICLPGQQLLGDGKSCAGLERLSNYGTQYSSYTLERFSPVRSDYQPSQHYRQYSQLYSSYSEYRNSRASFSRNRRTIRKTCPEGSEANHETCVDIDECQNRDTCQHECKNTIGSYQCVCPPGYRLMLNGKTCQDVDECLEQNVRCGPNRMCFNMRGSYQCIDTPCPPNYQRDPVLGFCLKNCPPNDLECTLSPYALEYKLVSLPFGIAANQDLIRLVAYTQDGVMHPRTTFLMIDEEPAVPFALRDENLKGVVYTTRPLREAETYRMKVGALSYSANGTIEYQTTFIVYIAVSAYPY

SEQ ID NO: 622 - protein, 88 aa, mus musculus
MDKNELVQKAKLAEQAERYDDMAACMKSVTEQGAELSNEERNLLSVAYKNVVGARRSSWRVVSSIEQKTEGAEKKQQMAREYREKIET

SEQ ID NO: 623 - protein, 252 aa, mus musculus
MLIKEYHILLPMSLDEYQVAQLYMIQKKSREESSGEGSGVEILANRPYTDGPGGNGQYTHKVYHVGSHIPGWFRALLPKAALQVEEESWNAYPYTRTRYTCPFVEKFSIEIETYYLPDGGQQPNVFNLSGAERRQRIVDTIDIVRDAVAPGEYKAEEDPRLYRSAKTGRGPLADDWARTAAQTGPLMCAYKLCKVEFRYWGMQAKIEQFIHDVGLRRVMLRAHRQAWCWQDEWIELSMADIRALEEETARML

SEQ ID NO: 624 - protein, 677 aa, mus musculus
MSGFLASLDPRRVQWGAAWYAMHSRILRTKPVESMLEGTGTTSAHGTKLAQVLTTVDLISLGVGSCVGTGMYVVSGLVAKEMAGPGVIVSFIIAAVASILSGVCYAEFGVRVPKTTGSAYTYSYVTVGEFVAFFIGWNLILEYLIGTAAGASALSSMFDSLANHSISRWMVDTVGTLNGLGKGEESYPDLLALVIAVIVTIIVALGVKNSVGFNNVLNVLNLAVWVFIMIAGLFFINGKYWAEGQFLPHGWSGVLQGAATCFYAFIGFDIIATTGEEAKNPNTSIPYAITASLVICLTAYVSVSMILTLMVPYYAIDTESPLMEMFVAHGFYAAKFVVAIGSVAGLTVSLLGSLFPMPRVIYAMAGDGLLFRFLAHVSSYTETPVVACIVSGFLAALLSLLVSLRDLIEMMSIGTLLAYTLVSVCVLLLRYQPESDIDGFVKFLSEEHTKKKEGILADCEKETCSPVSEGEEFSSPATNTCGAKNLPSLGDNEMLIGKSDKSAYNVNHPNYGTVDMTTGIEADESENIYLIKLKKLIGPRYYTMRIRLGLPGKMDRPTAATGHTVTICVLLLFILMFIFCSFIIFGSEYISGQSWWAILLVVLMMLLISVLVFVILQQPENPKKLPYMAPCLPFVPAFAMLVNIYLMLKLSTITWIRFAVWCFVGKQCLLEPWAFPF

SEQ ID NO: 625 - protein, 470 aa, mus musculus
MSYTLDSLGNPSAYRRVTETRSSFSRVSGSPSSGFRSQSWSRGSPSTVSSSYKRSALAPRLAYSSAMLSSAESSLDFSQSSSLLNGGSGGDYKLSRSNEKEQLQGLNDRFAGYIEKVHYLEQQNKEIEAEIQALRQKQASHAQLGDAYDQEIRELRATLEMVNHEKAQVQLDSDHLEEDIHRLKERFEEEARLRDDTEAAIRALRKDIEESSMVKVELDKKVQSLQDEVAFLRSNHEEEVADLLAQIQASHITVERKDYLKTDISTALKEIRSQLECHSDQNMHQAEEWFKCRYAKLTEAAEQNKEAIRSAKEEIAEYRRQLQSKSIELESVRGTKESLERQLSDIEERHNHDLSSYQDTIQQLENELRGTKWEMARHLREYQDLLNVKMALDIEIAAYRLWKLRFSTNIHESSQTFEISKPLLQLLLQSFVHTPAGFDLQGLSLEQAAAFRHLVLGSAHSVGVLGGALG

SEQ ID NO: 626 - protein, 296 aa, mus musculus
MRTRRTLRGHLAKIYAMHWGTDSRLLVSASQDGKLIIWDSYTTNKVHAIPLRSSWVMTCAYAPSGNFVACGGLDNICSIYSLKTREGNVRVSRELPGHTGYLSCCRFLDDNQIITSSGDTTCALWDIETGQQTVGFAGHSGDVMSLSLAPDGRTFVSGACDASIKLWDVRDSMCRQTFIGHESDINAVAFFPNGYAFTTGSDDATCRLFDLRADQELLMYSHDNIICGITSVAFSRSGRLLLAGYDDFNCNIWDAMKGDRAGVLAGHDNRVSCLGVTDDGMAVATGSWDSFLKIWN

SEQ ID NO: 627 - protein, 1131 aa, mus musculus
MELGMDPRVSSENHQKIPMEEEDEAREEPKNGGADDPEPFGSSHIMAEDSHMQKQLEFQNGSLEEGFVVRSLENEPQNMMESLSPRKYSSSLKFKANGDYSGSYLTLSQPVSAKRSPSPMGTSVRSSPSLAKIQGSKQFCDGIDKNISMKPPISFLSSAASLGGYPLGKADLDHYTGRDSERSTRLSEKPPYSRYSSRNKSHDSVYFLGGLEGRKTSGSLLTMWNGNSLSCTGSSPISRSGAASMPSSPKQVRKMNLQDHSTLQPRLSRHKEPASENVSVRTRKYSGSSLSNMGAYSRSLPRLYKATDNQMSPLSLPPRSSLGNSRRGQLGEKDLPHSLVDSDNYLNFSSLSSGASPYKTCLSEGNPYVSSALSVPASPRVARKMLLASTSSDDFDRASYSGTSPSHSFISGEPDRVLVARRNFSCGSMELDDSDLESLRQSSETPQPVLRERKSSISSISGRDDLMDYHRRQREERLREQEMERLERQRLETILSLCAEYTKPEGRRLSAGTTVADVQKINKELEKLQLSDEESVFEDALVCPDARYRCHRKGSLQDVDVAGFGNLGHSASFLAPRGSRSDELLGDLTRTPPSSSAAFLKATNESSYLSILPKTPEDIGEEQRTQELAAMEDARMVILNNLEELEQKIKDINDQMDESSRELDMECALLDGEQKSETAELMKEKEILDHLNRKITELEKNIVGEKTKEKVKLDAEREKLERLQELYSEQKTQLDNCPESMREQLQQQLKRDADLLDVESKHFEDLEFQQLEHESRLDEEKENLTQQLLREVAEYQRNIVARKEKISALKKQASHIVQQAQREQDHFVKEKNNLIMMLQREKENLCNLEKKYSSLTGGKGFPINPNTLKEGYISVNEINESCGNSTNLSPSTQFPADADAAVTEPALAVPVSQPQSSEHFRSLEERKKQHKEGLYLSDTLPRKKTTPSLSPHFSSATMGRSTTPKAHLPLGQSNSCGSVLPHSLATMTKDSESRRMLRGYNHQQMSEGQRQKPEFYSRTASESNVYLNSFHYPDRSYKDQAYDTLSLDSSDSMETSISACSPDNISSASTSNIARIEEMERLLKQAHAEKTRLLESREREMEAKKRALEEEKRRREILEKRLQEETSQRQK

SEQ ID NO: 628 - protein, 200 aa, mus musculus
MKWHLKMRWGILFSHPRDFTPVCTTELGRAAKLAPEFAKRNVKLIALSIDSVEDHLAWSKDINAYNGETPTEKLPFPIIDDKGRDLAILLGMLDPVEKDANNMPVTARVVFIFGPDKKLKLSILYPATTGRNFDEILRVVDSLQLTGTKPVATPVDWKKGESVMVVPTLSEEEAKQCFPKGVFTKELPSGKKYLRYTPQP

SEQ ID NO: 629 - protein, 161 aa, mus musculus
MVGCKLALKTIDWVSFVEIMPPNQKAIGNALKSWNETFHTRLASLSEKPPAIDWAYYKASVAKPGLVDDFEKKYNTLKIPVPEDKYTALVDQEEEEDVKNCAEFVSGSQLRIQECEKQLEKTRNIIPFDQMSIGDSNEIFPETKLDKKKYPYRPHQPIENL

SEQ ID NO: 630 - protein, 227 aa, mus musculus
MSELEQLRQEAEQLRNQIRDARKACGDSTLTQITAGLDPVGRIQMRTRRTLRGHLAKIYAMHWGTDSRLLVSASQDGKLIIWDSYTTNKVHAIPLRSSWVMTCAYAPSGNFVACGGLDNICSIYSLKTREGNVRVSRELPGHTGYLSCCRFLDDNQIITSSGDTTCALWDIETGQQTVGFAGHSGDVMSLSLAPDGRTFVSGACDASIKLWDVRDSMCRQTFIGHES

SEQ ID NO: 631 - protein, 805 aa, mus musculus
MPQSSPSAAATASDMDKNSGSNSSSASSGSSKGQQPPRSASAGPAGESKPKSDGKNSNGSKRYNRKREPSYPKNENFSNQSRRSNSQKSKTFNKMPPQRGGGSSKPFSSSSNGGRRDEVAEAQRAEFSPAQFSGPKKINLNHLLNFTFEPRGQAGHFEGSGHGGWGKRNKWGHKPFNKELFLQANCQFVVSEDQDYAAHFADPDTLVNWDFVEQVRICSHEVPSCPICLYPPTAAKITRCGHIFCWACILHYLSLSEKTWSKCPICYSSVHKKDLKSVVATESRQYAVGDTITMQLMKREKGVLVALPKSKWVNVDHPINLGDEQLSQYSKLLLASKEQVLHRVVLEEKGALEQQLAEEKHTPESCFIEAAIQEVKIREEALSGVAGGGGEVTGVVAALEHLVLMAPLATESAFQPRKQGVLEYLSAFDDEAAQVCSLDPPGPLALPLVEEEEAVSEPEACEDAEVADDSLGEGTVGPEMSQEEPITKPGFTQLSSSPCYYFYQAEDGQHMFLHPVNVRCLVREYGSLEQSPEKISATVVEIAGYSMSEDVRQRHRYLSHLPLTCEFSICELALQPPVVSKETLEMFSDDIEKRKRQRQKKAREERRRERRIEMEENKRQGRYPEVHIPLENLQQFPAFNSYTCPSDSALGPTSTEGHGALSLSPLSRSPGSHADFLLTPLSPTASQGSPSFCVGSLEDDSPFLSFAQMLRVGKAKADGWPKTAPKKDDNSLVPPAPVDSDGESDNSDRVPVPSFQNSFSQAIEAAFMKLDTPATSDPLSEDRGGKKRKRQKQKLLFSTSVVHTK

SEQ ID NO: 632 - protein, 209 aa, mus musculus
MAADISQWAGPLCLQEVDEPPQHALRVDYAGVTVDELGKVLTPTQVMNRPSSISWDGLDPGKLYTLVLTDPDAPSRKDPKFREWHHFLVVNMKGNDISSGTVLSDYVGSGPPSGTDALGLGIALESAEMAVLYSDSPGLHRYVWLVYEQEQPLSCDEPILSNKSGDNRGKFKVETFRKKYNLGAPVAGTCYQAEWDDYVPKLYEQLSGK

SEQ ID NO: 633 - protein, 172 aa, mus musculus
MPHATQLYQHVPEKRWPIVYSPRYNITFMGLEKLHPFDAGKWGKVINFLKEEKLLSDGMLVEAREASEEDLLVVHTRRYLNELKWSFVVATITEIPPVIFLPNFLVQRKVLRPLRTQTGGTIMAGKLAVERGWAINVGPTGTSICCEIFVVRMSLPNIYIFPMTGSSLPPRE

SEQ ID NO: 634 - protein, 179 aa, mus musculus
MKIIHEDGFSGEDVKQYKPVVYSNTIQSLAAIVRAMDTLGVEYGDKERKTDSKMVCDVVSRMEDTEPFSAELLSAMMRLWGDSGIQECFNRSREYQLNDSAKYYLDSLDRIGAGDYQPTEQDILRTRVKTTGIVETHFTFKNLHFRLFDVGGQRSERKKWIHCFEDVTAIIFCVALSGY

SEQ ID NO: 635 - protein, 210 aa, mus musculus
MQEFTKFPTKTGRRSLSRSISQSSTDSYSSAASYTDSSDDEVSPREKQQTNSKGSSNFCVKNIKQAEFGRREIEIAEQDMSALISLRKRAQGEKPLAGAKIVGCTHITAQTAVLIETLCALGAQCRWSACNIYSTQNEVAAALAEAGVAVFAWKGESEDDFWWCIDRCVNMDGWQANMILDDGGDLTHWVYKKYPNVFKKIRGIVEESVT

SEQ ID NO: 636 - protein, 162 aa, mus musculus
MSIEKIWAREILDSRGNPTVEVDLYTAKGLFRAAVPSGASTGIYEALELRDGDKQRYLGKGVLKAVDHINSRIAPALISSGISVVEQEKLDNLMLELDGTENKSKFGANAILGVSLAVCKAGAAERDLPLYRHIAQLAGNSDLILPVPAFNVINGGSHAGNK

SEQ ID NO: 637 - protein, 68 aa, mus musculus
MDYNATTPLEPEVIQAVTEAMKEAWGNPSSSYVSGRKAKDIINAARASLAKMIGGKPQDIIFTSGGTE

SEQ ID NO: 638 - protein, 127 aa, mus musculus
MVSKGLLRLVSSVNRRRMKLLLGIALFAYAASVWGNFVNMRSIQENGELKIESKIEEIVEPLREKIRDLEKSLLNSASAVWMTLSTTVFLVPTILALGLFLCSFTQKYPPVKFLSEKDRKRILITGG

SEQ ID NO: 639 - protein, 353 aa, mus musculus
MAAQKINEGLEHLAKAEKYLKTGFLKWKPDYDSAASEYGKAAVAFKNAKQFEQAKDACLREAVAHENNRALFHAAKAYEQAGMMLKEMQKLPEAVQLIEKASMMYLENGTPDTAAMALERAGKLIENVDPEKAVQLYQQTANVFENEERLRQAVELLGKASRLLVRGRRFDEAALSIQKEKNIYKEIENYPTCYKVEFWSPAERTGTGTKRTGTDPREEEHLGKGNPLCVWPTQILAVGTWDRPKKTIAQVLVHLHRNDYVAAERCVRESYSIPGFNGSEDCAALEQLLEGYDQQDQDQVSEVCNSPLFKYMDNDYAKLGLSLVVPGGGIKKKSPATPQAKPDGAAGMAAEEE

SEQ ID NO: 640 - protein, 370 aa, mus musculus
MAVAAAETRVFLEVRRRLQSALLILGGPDEGGMHLDISITPTSLLVRTPDGCTEIRLPAGVRLVPSSCGGLQYISGDGLHLRLRVQAESSPQPISVFNQSLQAQECCTFYCQSCGEVTIKDRKLLRVLPLPSENWSALVGEWCCHPDPFANRPLHPRENDCFIGDSFFLVNLKSDLEQEPKANTKVICKRCKVTLGETMSSETTKFYMTEVIIRPSEGSFPNIPRSQFLQSIIAQCLVELSSARSTFRFTIQGQDGKVYILLWVLNSDSLVIEPLRSSSCSRKFPLLESSLEAGSGSAWNAIKVLYQPCIKSRNKELASSWEGDISVHPLTLPSATCLELLLILSRNNASLPLSLRQMNSFQLRCSHCKT

SEQ ID NO: 641 - protein, 265 aa, mus musculus
MRDVYIVQDLMETDLYKLLKSQQLSNDHICYFLYQILRGLKYIHSANVLHRDLKPSNLLINTTCDLKICDFGLARIADPEHDHTGFLTEYVATRWYRAPEIMLNSKGYTKSIDIWSVGCILAEMLSNRPIFPGKHYLDQLNHILGILGSPSQEDLNCIINMKARNYLQSLPSKTKVAWAKLFPKSDSKALDLLDRMLTFNPNKRITVEEALAHPYLEQYYDPTDEPVAEEPFTFDMELDDLPKERLKELIFQETARFQPGAPEGP

SEQ ID NO: 642 - protein, 315 aa, mus musculus
MSIEKIWAREILDSRGNPTVEVDLYTAKGLFRAAVPSGASTGIYEALELRDGDKQRYLGKGVLKAVDHINSRIAPALISSGISVVEQEKLDNLMLELDGTENKSLELVKEAIDKAGYTEKMVIGMDVAASEFYRDGKYDLDFKSPADPSRYITGDQLGALYQDFVRNYPVVSIEDPFDQDDWAAWSKFTANVGIQIVGDDLTVTNPKRIERAVEEKACNCLLLKVNQIGSVTEAIQACKLAQENGWGVMVSHRSGETEDTFIADLVVGLCTGQIKTGAPCRSERLAKYNQLMRIEEELGDEARFAGHNFRNPSVL

SEQ ID NO: 643 - protein, 108 aa, mus musculus
MATITCTRFTEEYQLFEELGKGAFSVVRRCVKVLAGQEYAAKIINTKKLSARGGFYSCHFWQYSLNFSCCLSGMTSCSSLQEQTYPGRLSTPFSKLWPPLAHTLPGLF

SEQ ID NO: 644 - protein, 147 aa, mus musculus
MASTTTCTRFTDEYQLFEELGKGAFSVVRRCMKIPTGQEYAAKIINTKKLSARDHQKLEREARICRLLKHPNIVRLHDSISEEGFHYLVFDLVTGGELFEDIVAREYYSEADASHCIQQILESVNHCHLNGIVHRDLKSLSLAKCAP

SEQ ID NO: 645 - protein, 68 aa, mus musculus
MGKMAAAVASLATLAAEPREDAFRKLFRFYRQSRPGTADLGAVIDFSEAHLARSPKPGVPQEFSILGE

SEQ ID NO: 646 - protein, 513 aa, mus musculus
MEPAGPAPGRLGPLLLCLLLSASCFCTGATGKELKVTQPEKSVSVAAGDSTVLNCTLTSLLPVGPIRWYRGVGPSRLLIYSFAGEYVPRIRNVSDTTKRNNMDFSIRISNVTPADAGIYYCVKFQKGSSEPDTEIQSGGGTEVYVLAKPSPPEVSGPADRGIPDQKVNFTCKSHGFSPRNITLKWFKDGQELHPLETTVNPSGKNVSYNISSTVRVVLNSMDVNSKVICEVAHITLDRSPLRGIANLSNFIRVSPTVKVTQQSPTSMNQVNLTCRAERFYPEDLQLIWLENGNVSRNDTPKNLTKNTDGTYNYTSLFLVNSSAHREDVVFTCQVKHDQQPAITRNHTVLGFAHSSDQGSMQTFPDNNATHNWNVFIGVGVACALLVVLLMAALYLLRIKQKKAKGSTSSTRLHEPEKNAREITQVQSLIQDTNDINDITYADLNLPKEKKPAPRAPEPNNHTEYASIETGKVPRPEDTLTYADLDMVHLSRAQPAPKPEPSFSEYASVQVQRK

SEQ ID NO: 647 - protein, 195 aa, mus musculus
MVAAEAESDSVPLSGNVKNRKSIQEPRFDYYSHELPDIDLSECEFPHVIEIYDFPQEFRTEDLLRIFCSYQKKGFDIKWVDDTHALGVFASPITARDALGTKHTMVKIRPLSQATRAAKAKARACAEFLQPAKERPETSAALARRLVISALGVRSKQSKTEREAELRKLQEARERKRLEAKQREDIWEGRDQSVV

SEQ ID NO: 648 - protein, 286 aa, mus musculus
MPGARIGGSGSDGSNSGRSSGDTSGAVTVWEVVSLLGKLLGTVAALKVVLYLLRVCFAMAWKSGGASHSELIHNLRKNGIIKTDKVFEVMLATDRSHYAKSNPYMDSPQSIGFQATISAPHMHAYALELLFDQLHEGAKALDVGSGSGILTACFARMVGNSGKVIGIDHIKELVDDSITNVKKDDPMLLSSGRVRLVVGDGRMGYAEEAPYDAIHVGAAAPVVPQALIDQLKPGGRLILPVGPAGGNQMLEQYDKLQDGSVKMKPLMGVIYVPLTDKEKQWSRDEL

SEQ ID NO: 649 - protein, 1035 aa, mus musculus
MSTENVEGKPNNLGERGRARSSTFLRVFQPMFNHSIFTSAVSPAAERIRFILGEEDDSPAPPQLFTELDELLAVDGQEMEWKETARWIKFEEKVEQGGERWSKPHVATLSLHSLFELRTCMEKGSIMLDREASSLPQLVEMIADHQIETGLLKPDLKDKVTYTLLRKHRHQTKKSNLRSLADIGKTVSSASRMFSNPDNGSPAMTHRNLTSSSLNDISDKPEKDQLKNKFMKKLPRDAEASNVLVGEVDFLDTPFIAFVRLQQAVMLGALTEVPVPTRFLFILLGPKGKAKSYHEIGRAIATLMSDEVFHDIAYKAKDRHDLIAGIDEFLDEVIVLPPGEWDPTIRIEPPKSLPSSDKRKNMYSGGENVQMNGDTPHDGGHGGGGHGDCEELQRTGRFCGGLIKDIKRKAPFFASDFYDALNIQALSAILFIYLATVTNAITFGGLLGDATDNMQGVLESFLGTAVSGAIFCLFAGQPLTILSSTGPVLVFERLLFNFSKDHNFDYLEFRLWIGLWSAFMCLVLVATDASFLVQYFTRFTEEGFSSLISFIFIYDAFKKMIKLADYYPINSDFKVGYNTHFSCACLPPDPVNLSVSNDTTLAPEDLPTISSTDMYHNVTFDWAYLSKKECVKYGGKLVGNNCDFVPDITLMSFILFLGTYTSSMAMKKFKTSRYFPTTARKLISDFAIILSILIFCVIDALVGVDTPKLIVPSEFKPTSPNRGWFVPPFGGNPWWVCLAAAIPALLVTILIFMDQQITAVIVNRKEHKLKKGAGYHLDLFWVAILMVVCSFMALPWYVAATVISIAHIDSLKMETETSAPGEQPKFLGVREQRVTGTLVFILTGLSVFMAPILKFIPMPVLYGVFLYMGVASLNGVQFMDRLKLLLMPLKHQPDFIYLRHVPLRRVHLFTFLQVLCLALLWILKSTVAAIIFPVMILALVAVRKGMDYLFSQHDLSFLDDVIPEKDKKKKEDEKKKKKKKGSLDSDNDDSDCPYSEKVPSIKIPMDIMEQQPFLSDNKPLDRERSSTFLERHTSC

SEQ ID NO: 650 - protein, 1099 aa, mus musculus
MACRRRYFVEGEAPSSETGTSLDSPSAYHQGPLVPGSSLSPDHYEHTSVGAYGLYAGPGPQQRTRRPRLQHSTSVLRKQAEEEAIKRSRSLSESYELSSDLQDKQVEMLERKYGGRLVTRHAARTIQTAFRQYQMNKNFERLRSSMSENRMSRRIVLSNMRMQFSFEGPEKVHSSYFEGKQVSVTNDGSQLGALVPSECGDLSDPALKSPAPSSDFADAITELEDAFSRQVKSLAESIDDALNCRSLHSEEVPASDTARARDTEPKPGLHGMDHRKLDEMTASYSDVTLYIDEEELSPPLPLSQAGDRPSSTESDLRLRSGGAAQDYWALAHKEDKADTDTSCRSTPSLERPEPRLRVEHLPLLTIEPPSDSSVELSDRSDRSSLKRQSAYERSLGGQQGSPKHGPHGGPPKGLPREEPELRPRPPRPLESHLAINGSANRQSKSESDYSDGDNDSINSTSNSNDTINCSSESSSRDSLREQTLSKQTYHKETRNSWDSPAFSNDVIRKRHYRIGLNLFNKKPEKGIQYLIERGFVPDTPVGVAHFLLQRKGLSRQMIGEFLGNRQKQFNRDVLDCVVDEMDFSAMELDEALRKFQAHIRVQGEAQKVERLIEAFSQRYCVCNPGVVRQFRNPDTIFILAFAIILLNTDMYSPNVKPERKMKLEDFVKNLRGVDDGEDIPRETLIGIYERIRKRELKTNEDHVSQVQKVEKLIVGKKPIGSLHHGLGCVLSLPHRRLVCYCRLFEVPDPNKPQKLGLHQREIFLFNDLLVVTKIFQKKKNSVTYSFRQSFSLYGMQVLLFENQYYPNGIRLTSAVPGADIKVLINFNAPNPQDRKKFTDDLRESVAEVQEMEKHRIESELEKQKGVVRPSMSQCSSLKKESGNGTLSRACLDDSYASGEGLKRSALSSSLRDLSEAGKRGRRSSAGSLESNVEGSIISSPHMRRRATSTRECPSRPPQPVPNSSSLLGSLFGSRRGKPPPQAHPPSAPPPAPPHAHHPGPSEGPLHGHHAQYCHAQQNPPPYHHHHHYHPPPHLQHTHQYHHGPHGGHPPYGAHAHSHPPLPTAHPGHAGHSAHHHGQPPAPPPPTSSKAKPSGISTVV

SEQ ID NO: 651 - protein, 423 aa, mus musculus
MEEFRRSYNRLCEESGAEPQEAVLQQLHQLPKGGLDLTTQSLTVETCRALGKLLHKETLLKELVLSDCMLSEEGSTLLFQGLCANTSVQHLDLKGNNLRATGAEALGKLLRQNKSIQSLTLEWNNLGTWEDAFATFCGGLAANSALRQLDLRNNQISHKGAEELALALKGNTTLQQLDLRWNNIGLLGGRALVNCLPSNRTLWKLDLAGNNIPGDILRAVEQAMDHNQDRLTAFRENQARTKILSKEVQHLQEEKSKQFLDLMETIDKQREEMARDSRASAVRVGQLQEALNERQSIINALKAKLQMTEAALALSEQKVRDLGELLVAGDQERQSLSQRHEKERKLERQEAADRESKLLRDLSAASEKNLLLRSQVDELERKARSQQEQLFLTKQELTNTSAELKIRAIQAEGGSYDSSPGGE

SEQ ID NO: 652 - protein, 524 aa, mus musculus
MARTLQLSLTALLLLPMAIAMHSDCIFKKEQAMCLERIQRANDLMGLNESSPGCPGMWDNITCWKPAQIGEMVLVSCPEVFRIFNPDQVWMTETIGDSGFADSNSLEITDMGVVGRNCTEDGWSEPFPHYFDACGFDDYEPESGDQDYYYLSVKALYTVGYSTSLVTLTTAMVILCRFRKLHCTRNFIHMNLFVSFMLRAISVFIKDWILYAEQDSSHCFVSTVECKAVMVFFHYCVVSNYFWLFIEGLYLFTLLVETFFPERRYFYWYTIIGWGTPTVCVTVWAVLRLYFDDAGCWDMNDSTALWWVIKGPVVGSIMVNFVLFIGIIIILVQKLQSPDMGGNESSIYLTNLRLRVPKKAREDPLPVPSDQHSPPFLSCVQKCYCKPQRAQQHSCKMSELSTITLRLARSTLLLIPLFGIHYTVFAFSPENVSKRERLVFELGLGSFQGFVVAVLYCFLNGEVQAEIKRKWRSWKVNRYFTMDFKHRHPSLASSGVNGGTQLSILSKSSSQLRMSSLPADNLAT

SEQ ID NO: 653 - protein, 488 aa, mus musculus
MASTTTCTRFTDEYQLFEELGKGAFSVVRRCMKIPTGQEYAAKIINTKKLSARDHQKLEREARICRLLKHPNIVRLHDSISEEGFHYLVFDLVTGGELFEDIVAREYYSEADASHCIQQILESVNHCHLNGIVHRDLKPENLLLASKSKGAAVKLADFGLAIEVQGDQQAWFGFAGTPGYLSPEVLRKDPYGKPVDMWACGVILYILLVGYPPFWDEDQHRLYQQIKAGAYDFPSPEWDTVTPEAKDLINKMLTINPAKRITASEALKHPWICQRSTVASMMHRQETVDCLKKFNARRKLKGAILTTMLATRNFSAKSLLKKPDGVKKRKSSSSVQMMESTESSNTTIEDEDVKARKQEIIKVTEQLIEAINNGDFEAYTKICDPGLTAFEPEALGNLVEGMDFHRFYFENALSKSNKPIHTIILNPHVHLVGDDAACIAYIRLTQYMDGSGMPKTMQSEETRVWHRRDGKWQNVHFHRSGSPTVPIN

SEQ ID NO: 654 - protein, 191 aa, mus musculus
MPQYENPWTIPNLLSMTRIGLAPVLGYLILEEDFNVALGVFALAGLTDLLDGFIARNWANQKSALGSALDPLADKVLISILYISLTYADLIPVPLTYMIISRDVMLIAAVFYVRYRTLPTPRTLAKYFNPCYATARLKPTFISKVNTAVQLILVAASLAAPVFNYADSIYLQILWCCTAFTTAASAYSYYH

SEQ ID NO: 655 - protein, 876 aa, mus musculus
MVKEKKKADKKGDKSARSPSSISDNPEASKQDSNASKQEVAPSAVVPVVETPLKQAPKRDSVQMEQSEEETQYEEPILTKLIVESYEGEKVRGLYEGEGFAVFQGGNTYHGMFSEGLMHGQGTYIWADGLKYEGDFVKNIPMNHGVYTWPDGSTYEGEVTNGMRNGFGMFKCGTQPVSYIGHWCHGKRHGKGSIYYNQEGTSWYEGDWVYNIKKGWGIRCYKSGNIYEGQWENNMRHGEGRMRWLTTNEEYTGHWEKGIQNGFGTHTWFLKRIPNSQYPLRNEYIGEFVNGFRHGQGKFYYASGAMYEGEWASNKKQGRGRMTFKNGHVYEGLFSNDHIAQFFETEMDYSQSLDRWSDASQRSRQPRGSSVSAVREPETLRKLDGSESRSVLGTSIELDLTLLLDMYPEESQEEEKKQVEYAVLRNITELRRIYCFYSGLGCDHSLDNTFLMTKLHFWRFLKDCRFHHHNITLADMDRVLSVYNGIPIEEIHSPFRTILLRTFLNYLLQLAYYIHHKEFQNRSPSLFLCFTKLMSENIHPHACQVKGHLFSEQQRTLYSMNYIDKCWEIYTAYCRPNEAPPYELTMKMRYFLWMLKDFRMINKDLTATKFMTVIAEDNPFVYDGTDSNFELELVFLEFFEALLCFSLCCMFDQMTRSYLKVPYDDITTNRYGSTQTILNQSIHRSPSAITSHDSEVHFSSTKSSLDKIGALPDGKIRQSEPKLKKSLSEDKVSKMNFKTQGRGLVFMSPQGEKYEKPKDEQKEKLNIWVNNLYVFFVSVLFSAYKREEMLKEKVKENQLQEAELAQQRQIENEELEARLNILREEEARKQDFELDITVLKEPSEIPASQPLTPSPPKEDLASIQTSKASPGKKKKK

SEQ ID NO: 656 - protein, 4859 aa, mus musculus
MATMVPPVKLKWLEHLNSSWITEDSESIATREGVTVLYSKLISNKEVVPLPQQVLCLKGPQLPDFERESLSSDEQDHYLDALLSSQLALAKMVCSDSPFAGALRKRLLVLQRVFYALSNKYHDKGKVKQQQHSPESSSGSADVHSVSERPRSSTDALIEMGVRTGLSLLFALLRQSWMMPVSGPGLSLCNDVIHTAIEVVSSLPPLSLANESKIPPMGLDCLSQVTTFLKGVTIPNSGADTLGRRLASELLLGLAAQRGSLRYLLEWIEMALGASAVVYTMEKNKLLSSQEGMISFDCFMAILMQMRRSLGSSADRSQWREPTRTSEGLCSLYEAALCLFEEVCRMASDYSRTCASPDSIQTGDAPIVSETCEVYVWGSNSSHQLVEGTQEKILQPKLAPSFSDAQTIEAGQYCTFVISTDGSVRACGKGSYGRLGLGDSNNQSTLKKLTFEPHRSIKKVSSSKGSDGHTLAFTTEGEVFSWGDGDYGKLGHGNSSTQKYPKLIQGPLQGKVVVCVSAGYRHSAAVTEDGELYTWGEGDFGRLGHGDSNSRNIPTLVKDISNVGEVSCGSSHTIALSKDGRTVWSFGGGDNGKLGHGDTNRVYKPKVIEALQGMFIRKVCAGSQSSLALTSTGQVYAWGCGACLGCGSSEATALRPKLIEELAATRIVDISIGDSHCLSLSHDNEVYAWGNNSMGQCGQGNSTGPITKPKKVSGLDGIAIQQISAGTSHSLAWTALPRDRQVVAWHRPYCVDLEESTFSHLRSFLERYCDKINSEIPPLPFPSSREHHNFLKLCLKLLSNHLALALAGGVATSILGRQAGPLRNLLFRLMDSTVPDEIQEVVIETLSVGATMLLPPLRERMELLHSLLPQGPDRWESLSKGQRMQLDIILTSLQDHTHVASLLGYSSPSDAADLSTVCMGYGNLSDQPYGSQICHPDTHLAEILMKTLLRNLGFYTDQAFGELEKNSDKYLLGTSSSENSQPAHLHELLCSLQKQLLAFCHINNVTENSSSVALLHKHLQLLLPHATDIYSRSANLLKESPWNGSVGEKLRDVIYVSAAGSMLCQIVNSLLLLPVSVARPLLSYLLDLLPPLDCLNRLLPAAALLEDQELQWPLHGGPEVIDPAGVPLPQPAQSWVWLVDLERTIALLIGRCLGGMLQGSPVSPEEQDTAYWMKTPLFSDGVEMDTPQLDKCMSCLLEVALSGNEEQKPFDYKLRPEVAVYVDLALGCSKEPARSLWISMQDYAVSKDWDSATLSNESLLDTVSRFVLAALLKHTNLLSQACGESRYQPGKSLSEVYRCVYKVRSRLLACKNLELIQTRSSSRDRWITDNQDSADVDPQEHSFTRTIDEEAEMEELAERDREDGHPEPEDEEEEREHEVMTAGKIFQCFLSAREVARSRDRDRMNSGAGSGVRADDPPPQSQQERRVSTDLPEGQDVYTAACNSVIHRCALLILGVSPVIDELQKRREEGQLQQPSVSASEGTGLMTRSESLTAESRLVHASPSYRLIKSRSESDLSQPESDEEGYALSGRRNVDFDLASSHRKRGPMHSQLESLSDSWTRLKHTRDWFYNSSYSFESDFDLTKSLGVHTLIENVVSFVSGDVGNAPGFKEPEESMSTSPQASIIAMEQQQLRAELRLEALHQILTLLSGMEEKGNVLLTGSRSSSGFQSSTLLTSVRLQFLAGCFGLGTVGHTGTKGESGRLHHYQDGIRAAKRNIQVEIQVAVHKIYQQLSATLERALQANKHHIEAQQRLLLVTVFALSVHYQPVDVSLAISTGLLNVLSQLCGTDTMLGQPLQLLPKTGVSQLSTALKVASTRLLQILAITTGTYADKLSPKVVQSLLDLLCSQLKNLLSQTGVLFMASFGEGEEGEEEEKKVDSSGEAEKRDFRAALRKQHAAELHLGDFLVFLRRVVSSKAIQSKMASPKWTEVLLNIASQKCSSGIPLVGNLRTRLLALHVLEAVLPACESGVEDDQMAQVVERLFSLLSDCMWETPIAQAKHAIQIKEKEQEIKLQKQGELEEEDENLPIQEVSFDPEKAQCCIVENGQILTHGSGGKGYGLASTGVTSGCYQWKFYIVKENRGNEGTCVGVSRWPVHDFNHRTTSDMWLYRAYSGNLYHNGEQTLTLSSFTQGDFITCVLDMEARTISFGKNGEEPKLAFEDVDAAELYPCVMFYSSNPGEKVKICDMQMRGTPRDLLPGDPICSPVAAVLAEATIQLIRILHRTDRWTYCINKKMMERLHKIKICIKESGQKLKKSRSVQSREENEMREEKENKEEEKGKHNRHGLADLSEPQLRTLCIEVWPVLAVIGGVDAGLRVGGRCVHKQTGRHATLLGVVKEGSTSAKVQWDEAEITISFPTFWSPSDTPLYNLEPCEPLLFDVARFRGLTASVLLDLTYLTGIHEDVGKQSIKRHEKKHRHESEEKGDIEQKPESESILDVRTGLMSDDVKSQGTTSSKSENEIASFSLEPTLPGVESQHQITEGKRKNHEHISKTHDIAQSEIRAVQLSYLYLGAMKSLSALLGCSKYAELLLIPKVLAENGHNSDCASSPVVHEDVEMRAALQFLMRHMVKRAVMRSPIKRALGLADLERAQAMIYKLVVHGLLEDQFGGKIKQEIDQQAEESDQAQQAQTPVTTSPSASSTTSFMSSSLEDTTTATTPVTDTETVPASESPGVMPLSLLRQMFSSYPTTTVLPTRRAQTPPISSLPASPSDEVGRRQSLTSPDSQSTRPANRTALSDPSSRLSTSPPPPAIAVPLLEMGFSLRQIAKAMEATGARGEADAQSITVLAMWMIEHPGHEDEEEPQPSSTADSRHGATVLGSGGKSNDPCYLQSPGDIPSADAAEMEEGFSESPDNLDHTENAASGSGPPTRGRSTVTRRHKFDLAARTLLARAAGLYRSVQAHRNQSRREGISLQQDPGALYDFNLDEELEIDLDDEAMEAMFGQDLTSDNDILGMWIPEVLDWPTWHVCESEDREEVVVCELCECNVVSFNQHMKRNHPGCGRSANRQGYRSNGSYVDGWFGGECGSGNPYYLLCGSCREKYLALKTKTKTTNSERYKGQAPDLIGKQDSVYEEDWDMLDVDEDEKLTGEEEFELLAGPLGLNDRRIVPEPVQFPDSDPLGASVAMVTATNSMEETLMQIGCHGSVEKSSSGRVTLGEQAAALANPHDRVVALRRVTAAAQVLLARTMVMRALSLLSVSGSSCSLAAGLESLGLTDIRTLVRLMCLAAAGRAGLSTSPSAIASTSERSRGGHSKASKPISCLAYLSTAVGCLASNTPSAAKLLVQLCTQNLISAATGVNLTTVDDPIQRKFLPSFLRGIAEENKLVTSPNFVVTQALVALLADKGAKLRPNYDKTEIEKKGPLELANALAACCLSSRLSSQHRQWAAQQLVRTLAAHDRDNQTAPQTLADMGGDLRKCSFIKLEAHQNRVMTCVWCNKKGLLATSGNDGTIRVWNVTKKQYSLQQTCVFNRLEGDAEESLGSPSDPSFSPVSWSISGKYLAGALEKMVNIWQVNGGKGLVDIQPHWVSALAWPEEGPATTWSGESPELLLVGRMDGSLGLIEVVDVSTMHRRELEHCYRKDVSVTCIAWFSEDRPFAVGYFDGKLLMGTKEPLEKGGIVLIDAHKETLVSMKWDPTGHILMTCAKEENVKLWGPVSGCWRCLHSLCHPSTVNGIAWCSLPGKGSKMQLLMATGCQNGLVCVWRIPQDTTQTSMTSSEGWWDQESNCQDGYRKSAGAKCVYQLRGHITPVRTVAFSSDGLALVSGGLGGLMNIWSLRDGSVLQTVVIGSGAIQTTVWIPEVGVAACSNRSKDVLVVNCTAEWASANHILATCRTALKQQGVLGLNMAPCMRAFLERLPMMLQEQYAYEKPHVVCGDQLVHSPYMQCLASLAVGLHLDQLLCNPPVPPHHQNCLPDPTSWNPNEWAWLECFSTTIKAAEALTNGAQFPESFTVPDLEPVPEDELVLLMDNSKWINGMDEQIMSWATSRPEDWHLGGKCDVYLWGAGRHGQLAEAGRNVMVPATAPSFSQAQQVICGQNCTFVIQANGTVLACGEGSYGRLGQGNSDDLHVLTVISALQGFVVTQLVTSCGSDGHSMALTESGEVFSWGDGDYGKLGHGNSDRQRRPRQIEALQGEEVVQMSCGFKHSAVVTSDGKLFTFGNGDYGRLGLGNTSNKKLPERVTALEGYQIGQVACGLNHTLAVSADGSMVWAFGDGDYGKLGLGNSTAKSSPQKVDVLCGIGIKKVACGTQFSVALTKDGHVYTFGQDRLIGLPEGRARNHNRPQQIPVLAGVVIEDVAVGAEHTLALASTGDVYAWGSNSEGQLGLGHTNHVREPTLVTVLQGKNIRQISAGRCHSAAWTAPPVPPRAPGVSVPLQLGLPDAVPPQYGALREVSIHTVRARLRLLYHFSDLMYSSWRLLNLSPNNQNSTSHYNAGTWGIVQGQLRPLLAPRVYTLPMVRSIGKTMVQGKNYGPQITVKRISTRGRKCKPIFVQIARQVVKLNASDLRLPSRAWKVKLVGEGADDAGGVFDDTITEMCQELETGIVDLLIPSPNATAEVGYNRDRFLFNPSACLDEHLMQFKFLGILMGVAIRTKKPLDLHLAPLVWKQLCCVPLTLEDLEEVDLLYVQTLNSILHIEDSGITEESFHEMIPLDSFVGQSADGKMVPIIPGGNSIPLTFSNRKEYVERAIEYRLHEMDRQVAAVREGMSWIVPVPLLSLLTAKQLEQMVCGMPEICVDVLKKVVRYREVDEQHQLVQWLWRTLEEFSNEERVLFMRFVSGRSRLPANTADISQRFQIMKVDRPYDSLPTSQTCFFQLRLPPYSSQLVMAERLRYAINNCRSIDMDNYMLSRNVDNAEGSDTDY

SEQ ID NO: 657 - protein, 261 aa, mus musculus
MTTMADKMDMSLEDIIKLNKMQQGHRDRPDSRVKRGTGPKRYQPAFTHGGRNRLAPYCRQKQLPDKWQHDLFIGGFRGQNDVDTGGKLFLSNLHFGVSDADIQLLFAEFGTLKKSAVHYDRCGRSLGTAHVHFERKADALKAMREYNGTPLDGHPMNIHLVTSQCDRQGRPAQSKNRGGMTRNPGSGVLSGGGTKRWTLGGSQRRGRGSSRNSNLQQQQQQEEQKHQKQQQQQQQQQKQGQYHQHQQQLQHQEQQKEQKEQ

SEQ ID NO: 658 - protein, 305 aa, mus musculus
MSDHGKSVKTTEEVALQLLLLCQFGVGTLANVFLFVHNFSPVLTGSKQRPRQVILSHMAMANALTLFLTIFPNNMIAFAPKTPPTELKCKLEFFSHMVARSTNLCSTCVLSIHQFVTLVLVNRGKLILRASVPNFVSYSCYSCWFFSVLSNIHIPIKVTGPQITDNNTDSKSNLFCSTSGFIVGIVFLQFAYDATFMSIMVWTSVSMILLLHRHRQRMQHILTPNQNPRGQAETRATRTILMLVVTFVSFYLLNFICIIFHTLLMHSHLFIRLVSEVLAAVFPSICPLLLIFRDPKDPCSVLFNC

SEQ ID NO: 659 - protein, 510 aa, mus musculus
MPAQSEEELPLPSPQPGNSEDRNFHSQYKVIRTIGHGTFAKVLLAQHRLTGTSVAIKVLVKNKPWFQEAMKEANILKKIKHPNIVSLLQVIETKTRGYLILELVEGQELYEYIKTSGHIEEDKARQIFIQILSAVGYCHGHGIVHRDLKPDNIMIDNKGNIKIIDFGLSTQFKPGEILKEHCGAYAFGAPERFLGQRYDGTKSDLGALGVVLHYMVVGKVPFDSFINPELQRQVVAGVYPAHCGVSKELEDLLSRLMTVIPKYRPTATEVMKHPWLKGHWKGLTDIHEEPVPVRPDPDIVDAMQYIGFRAKDIRESLTEEKFNEMSAAYYLLERQALQREVCSTQAPTVSQVKAPFPSIDVAGASCLKMKKSGSAPILGRSVWPSSIGQVPAYGQKVRQRAGSRSTGHGLLFRPHQMTPTQDQHHIRAMSVPCMLSTSSISEQSMASEKREENILSHSALAEDMPIVSRGWPRGIMQWTRRVGNAITMLCCCIPSTKKPQLGQNRVSPHK

SEQ ID NO: 660 - protein, 640 aa, mus musculus
MVEPQPNLDQPSSRRGLQPLSPCQISDTTGLQSPAVDPPQACHPVGLLCSGSHMHVAPGPQHYNLRDLPVHNNFNNLYGVQGGPGRGLHEGESLGVRCDSSSVGTHRPPQLSDKYSQNLEWLRLEHIPLQAGVQKLALSVELTEAKLHHGFGETDALLKVLQSGTGEVLAPQEPAVPSSEEFYTRQKKTIETLRRQRAERLHNFRRTRSLSPQKQLGLLPSKDLPTWELDLPSRRQEYLQQLRKHIVDTTRIPEPAPGLARPPSDIELMLQEYRRAREEAKVEIAQARDRLKERTEQEKMRIRQQIISQLLKEEEKLQTLANFSSLYTSSNGSISSGVTSGYNSSPAFSGHLQSLEVSGDSQVPDSQDTWIGDWQDQSTVRNSYLYLTGSSWKSLAHSRRASMGSGCCSASSLSSLGACFSFPYQDLAKHIVSTSMADVMAACSDNLHNLFIRQATDGWNYQGEEQEVQLYYKEFSSTRHGFLGASVVSQPLSQVWAAVSDPTLWPLYHKPIQTARLHQRVTNSISLVYLVCNTTLCELKQLRDFCCVCVEAKEGCLSIMAAQSVYDASMPRPSRKMVRGEILPSAWVLQPVIIEGKEITRVISLVQVELGAPGFPPHLLNSCIKQQPLVVAKLASFLRS

SEQ ID NO: 661 - protein, 1997 aa, mus musculus
MSLCPPPCCLLRSFFTNAAAKLPSSKKDDLSSKQKKTSRGDKTERIGSEGNLTEYQQVQAAATSAQRKAAAAHKEQGRSNLHVTSQEDAACRRPRERLSNGNARAQVSKPARNIPRRHTLGGPRSSKEILGMQPSEMDRKREAFLEHLKQKYPHHATAIMGHQERLRDQTKSPKLSHSPQPPNLGDPVEHLSETSGDSLEAMSEGEVPSPFARGSRTRASLPVVRSANQTKERSLGVLYLQYGDETKQLRMPNEVTSTDTIRALFVSAFPQQLTMKMLESPSVAIYIKDDSRNVYYELNDVRNIQDRSLLKVYNKDPSHAFNHMTKAVNGDMRMQREIVYARGDGLVAPRPGSVAHPPHVIPNSPPSTPVPHSLPPSPSRIPYGGSRPMAIPGNATIPRDRLSSLPVSRSISPSPSAILERRDVKPDEDMSSKNLVMFRNEGFYADPYLYHEGRMSIASSHGGHPLDVPDHVIAYHRTAIRSASAYCSPSLQAEMHMEQSLYRQKSRKYPDSHLPTLGSKTPPASPHRVGDLRMIDLHPHLNTHGPPHTLQPDRASPSRQSFKKEPGTLVYIEKPRNTSGLSSLVDLGPPLVEKQGFAYSTTTIPKDRETRERMQAMEKQIASLTGLVQSALFKGPITSSSKEASSEKMVKATANRNQADGAGTAHVSAGKVLGSVEFSLPPSQPLPAGTSPIHTSLLDMRRNVAELRLQLQQMRQLQLQNQEILRAMMKKAELEISNKVKETMKRLEDPVQRQRTLVEQERQKYLHEEERIVKKLCELEDFVEDLKKDSSSTGRVVTLKDVEDGAFLLRQVGEAVATLKGEFPTLQNKMRAVLRIEVEAVRFLKEEPHKLDSLLKRVRSMTDVLTMLRRHVTDGLLKGTDASQAAQYVAMEKATAAEVLKHQEETAHAPGQPLHCSTGSPGDVKSEVVPLSTMTVHHVQSSPVVMQPSQHSSALMNPAQNLPGGTRPHTASPPAITQEVTSAQSAPGPQSPQTPVNGSSMQSLFIEEIHSVSAKNRAVSIEKAEKKWEEKRQNLEHYNGKEFEKLLEEAQANIMKSIPNLEMPPASSPVSKGDAAGDKLELSEDSPNSEQELDKIGGKSPPPPPPPPRRSYLPGSGLTTTRSGDVVYTGRSMSKVSSEDPGPTPQTRATKCPPEEPASAWAPSPPPVPAPSSKEEEEEEEEGDKIMAELQAFQKCSFMDVNPNSHAEQSRANSHLKDTRAGATAPPKEKKNLEFYHEDVRKSDVECENGPQVESQKVTAGALRPSGPPKWERVMVDSISDTSRTSECRADTFTEENATPNKSLFRDSRNYSQKNVPKVSFSSSGLNSLEGEINKGPNVSGLQCAIPDLENQKLNFGKTKEIGQQGQENADKSHIPLPTRSAEFSIHDVKTQDQDVPVTGYGQVVLRSKVGRHANMNMNEDGESTPSSPSEEHTATDNIAFMITKTAVQVLSSGEVHDIVSQKGQDVQTVNIDGRKETASQHEGTEGEEPVVCLDKKPVIIIFDEPMDIRSAYKRLSTIFEECDEELERMLTEEKIEEEEEDENEDSGVRTSSQMSCEQVDSRSDRMGQKAETQSQPHVLSAELLTPGVQGVRKAEQRKLSSADSPDSGNKCGMVDDQFESPKKKFKFKFPKKQLAALTQAIRTGTKTGKKTLQVVVYEEEEEDGTLKQHKEAKRFEITRSQPEDALKTMARRQEQLSPEGTLPASRTDEIRKSTYRTLDSLEQTIKQLENTISEMSPRALVDTSCSSNRDCGASLPHMAQEVSPRSLLVLDEVPPAPEPPTSISPASRKGSSTTPQTSRMPVPMTSKNRPGSLDKASKQSKLQDPRQYRQANGSAKKAGGDCKPTSPSLPASKIPALSPSSGKSSSLPSASGDSSNLPNAPATKPSIASTPLSPQAGRSAHSASLIPSVSNGSLKFQSPPHAGKGHHHLSFALQTQNGRAAPTTSSSSSPPSPASPTSLNQGARGIRTIHTPSLASYKAQNGSSSKATPSTAKETS

SEQ ID NO: 662 - protein, 536 aa, mus musculus
MVLLDDELCDLNSIPNVTEQPLISAGENRVQVLKNVPFNIVLPHSNQLGIDKRGHLTAPDTTVTVSIATMPTHSIKTEIQPHGFAVGIPPAVYHSEPTERVVVFDRSLSTDQFSSGTQPPNAQRRTPDSTFSETFKEGVQEVFFPSELSLRMPGMNSEDYVFDNVSGNNFEYTLEASKSLRQKQGDSTMTYLNKGQFYPVTLKEGSSNEGIHHPISKVRSVIMVVFAEDKSREDQLRHWKYWHSRQHTAKQRCIDIADYKESFNTISNIEEIAYNAISFTWDINDEAKVFISVNCLSTDFSSQKGVKGLPLNIQIDTYSYNNRSNKPVHRAYCQIKVFCDKGAERKIRDEERKQSKRKVSDVKVQLLPSHKRTDITVFKPFLDLDTQPVLFIPDVHFTNLQRGSHVLSLPSEELEGEGSVLKRGPFGTEDDFGVPPPAKLTRTEEPKRVLLYVRKESEEVFDALMLKTPSLKGLMEAISDKYDVPHDKIGKIFKKCKKGILVNMDDNIVKHYSNEDTFQLQIEEAGGSYKLTLTEI

SEQ ID NO: 663 - protein, 6870 aa, mus musculus
MAASPVLPTEDGEGFLGIDDLHFSLQAEQEDTQKKTFTCWINSQLAKHTPPSVVSDLFADIKKGHVLLDLLEVLSGQQLPRDKGSNTFQCRINIEHALTFLKNRSIKLINIHVADIVEGNPSIILGLIWTIILHFHIEKLAQTLSCDYNQPSPEVVSVAASSPTSSPPTKKCSKAQAQARWQWSAKKALLQWAQEQCARSESVNVTDFKSSWRNGMAFLAVIHALRPDLIDMDSMRHRSNKDNLKEAFRIAEHELKIPKLLEPEDVDVVNPDEKSIMTYVAQFLKYSKDAPGPGDSTQAKVRDALVWLTLQEKRFQKMLKDSASETYCNKYHSLLSFMESLNEEKESFIDVLSLKGRMGELNEDESRLRQGWTSLMHQVAAWRAQLDDALPSPLKETEAWLKDIEGVVQEGVPTSQSYSEARTLIQGKLSSFKSLMGSFDYHSDVLMAFQSNAEKSLPAVPPVKLEEMTRRINNVLGKNFIPLLEFHDSKCSVLALLDEAKAKLDVWNGTYESKESVEVLLEDWHKFTGEKKFLIQLDASFQKCEEMYKNSARECESIREEYMMLEKNVHSCRQYIHNTKATLQRALMSWATFEEDLALLKASFDLTKKEQIKEVPVETLLQWNTKHTSLNEVGSFLIGVSSREVAASISKELRRLNKRWRKFITKTPLELKLPLVKIQDQPPGNSSGTSLSKESAMAAEPGGSRGEDVKAAEKQEVEDEESAGQLKVNEEVEGLIKQVTIWESQTKSILDLLQHGDHADGSSADTLQHLIAKGSVYEELLARTEDTLQMDVQSPSNLEPFQNVLRAGLQAKIQEAKQGVQITMVELSAVLKNLSDEPLELDLGLKVEEAQKELEVSILRAEQLLGQRERPGGFLLKYKEALEILNTNSLAKYLRAVEELKRTVPGGAKLQLEEQSRVASAKWEPLRHEISLYLQQLKIAIEEEKLRDNIARLEKQINKEKKLIRRGRTRGLRKEHEACLSPESIKCQLEHHVGVLRVLCEELTSPEDQQELKRALRDYEQKIARLLKCASEIHTTLQSSQGGALEERSALITTENGRRDADGEVPLEIPDNQLSTEKAMEPIKNFSQTSELKPQQEESIMEKEGKDCSASLSDLQERYDTQRGLLEQHLQDSKSRVTSDFASEQERSSACLQSKLAELQVLLADTDAHWEKFEITSLNLRRLMSDAEKPVLNQERDLLKGNEQVLHGLLNTRMESLEMALQIVLPLEKECSLLCASDLPLCTVAVQDLHPVEIDGVYQNLRDIRDSIAKQIRVCTSLEEPSNSVPRELHTLDQCAIQDIVLKCRLQLETMNQKVEMREDALDALEGFLASLRAAKLSAELPADRPAPKAPEVLSEDILLMKEKAGPLDERLRTLGINIKDAEGGENTTCERLVGALSVNLVAMDGQSKEEGPPEDKKLLEACSSKNLELFKNIQDLQNQISKIGLKDPTAPAVKHRKKSLLRLDKDLDGLEEEKVRIQKIAGSLPRFKDGSEKNVIQQCEDTAALWESTKASVTESLEQCGSALELLRQYQNIKNNLTALIQKEEGIISQQASYMGKDNLKKKIAEIETVKEEFSDHLEVVDKINQICKNLQYHLNKMKTFEDPPFEKEANAIVDRWLDINEKTEEYGENLGRALALWDKLFIIKNNIDEWTEQILGKAESHELTEEDRGRLKEELKVLEEQSAEFSRRVADIQSLLQSNEKPLELQVMESSVLSKMKDVKTHVAGGSNSYAPSGSTAELREDLDQAKTQMGMTESLLNALSPSDSLEIFTKLEEIQQQIFQQKHSMTVLENQIGCLTPELSELKRQYASVSNLFNTKKNALQDHFATFLNEQCKNFNDWFSNVKTNLQECFEPPETKLSLEQRLQKLSDFLTLGGGNSKIQQVETVLQHVKMLLPKAHVKELDSWLRSQELELENMESICQARAGELNNSFQQLLRLEDDCRSLSKWLTNQEENWGKMEVSGERMDLFSQALTRKREQFETVAQLSDSLKEHGLTEGEETIKESTHLIDRYQALWRQLHEIEEEDKLPAAEDQSFNDLADDVIHWIKEIKESLMALNSSEGKMPLEERIQKIKEIIALKPEGDAKIQMVMRQAEHCEAPLAQETFTDLSNQWDSTLHLANTYLSHQEKLVLEGEKYLQSKEDLRLMLTELKKQQEAGFALQPGLPEKQAQLKIYKKFLQKAQDLTSLLEELKSQGNYLLECTKNPSFSEEPWLEVKHLHESLLQQLQDSVQKLEGHVQEHSSYQVCLTDLSSTLDDISKEYFSLCDGSKDQIMAKERMQKLQELESRLRFQGGALKKASALAKSIKQNTSSVGQKIIKDDIRSLKYKQKDLENRIESAKQETENGLNSILKSKSSTEKHVKFSLPVEEMPATSEVPKPTRESAAVGESGGARETNTNSAVEMILSKQLSLNVQESMQNAQDEREVNELQNQPLELDIMLRNEQLKGMEELSTHLEARRAAIELLEQSQHLNQTEEQALVLPAARPSVCHLGSLQQELHTLKKTKERQYGLLSGFQDQLVMAEASLNTSLAEVESLKIGSLDSATYLGKIKKFLGSVENQQGSLSKLRTEWAHLSSLLAAADQKLVESQMKHLEHGWELVEQLAHRKCFQQATEHSELTCLLEKLQDLKVSLHQQQQRLTLSLNSPGQQAAIVDMVTPAAELQAIKCEFSGLKWQAELHMKRLWGEKDKKTLEDAINNLNKQMEALEPLNREVENRIKKCELQNRIKETLSWVKNTMAELVVPIALLPDNILSQIRKCKLIHDGILGNQQAVELLVEEVRGITPSLAPCEGDGLNALLEDLQSQHQALLLKSTERSQQLELKLEEKSKLFAIIGKVQLTLEESETLMSPTGDRASTEAELERRLAILKASQQQLQDTESALSAHLQELTNAYKDANVFERLFLDDQLKNLKARTNRTQRFLQNNGSELKQKMESYREFHDKAAVLQKEAECILHGGLLPLRQELEQDAKEQLGNLRDKLAAIRGSLSQVLTSEEVFDTIGLSWDGSLLARLQTQVLEREREVEGKIKQLDTFLIARDRHQASISKIRAVDLQIKKGAESLLKVPSMSPESTLLNAQTLIQKIEKSKRLRDEIIRKLSKNEAFDDSFKESEMQRLKLCAEENSRLQEALQNMLLELQPREMGEKEFREKLENALHVLKQIQSRLQQPLCVNLGVQHIQHEKETWEAFGEQVEAEMCGLRAVRITEEQREENDSGTGGMEAKLRDIEGLHMELSKSISLRADVLNDAYDSANRYDELVAGALRIITSLEATLLSYRVDLHNPQKTLELAHLKQEELQSSVADLRSLTETLGAISSPEAKEQLRCTLEVLAAKNSALKAGLEAQEAEEERCLENYKCFRKMKEEICSRLRKMEMDLGQSIFPLPRSYKEALARLEQSKALTSNLLSTKEDLVKLRQLLRHLRCRSTENDATCALGVASALWEKWLSLLEAAREWQQWGGELKREWKFISEEIEREAIILETLQEDLPEISKTNAAPTEELWQLLDSLCQHQESVEKQQLLLALLLQRVRSIQNIPEGTETGETIPALQEIGSMQERCDRLLHTTRKNKDLVQAEIQAQQSFLKEIKDVKRVFEQISTSFPNLAPEGHPERAEQFEELRSILQKGKLSFENIMEKLRIKYSEMYSIVPAEIGSQVEECRSALEDAEEKMSSEVSKSSPSSIMRRKIERINNGLHCVEKMLQQKSRNIEEAHEIQKKIWDELDLWHSKLNELDSEVQDFVEQDPGQAQEWMDNLMAPFQQHQQVSQRAESRTSQLNKATIKMEEYNDLLKSTEVWIEKTSCLLANPACYDSSRTLSHRASTLQMALEDSEQKHSLLHSIFTDLEDLSIIFETDDLIQTIHELSDQVAALQQQIMEALPHVQQVADDVVAIESEVKAMEKKVAKIKAILLSKEIFDFPPEEHLKHGEVILENIHPMKKTIAEIMTYQVELRLPQTGTKPLPVFQRTSQLLQDVKLLENVTQEQNELLKVVIKQTAECDEEIDSLKQMLTNYSAEISPEHVSQNQVADLPSLQGEMERLEKQILNLNQKKEDLLVDLKTAVLNLHEHLKQEQQEVGDKPSAGASECTVAERDASERKLSRTNSMSFLPVVKEEAEESSVKSEDGRRRTEPPSASWSFLGKHSKDLEGDGASSSSSATIVQDADGRISTCDSSMVHIIAPDSGSTEEGPAPSPRLSQTDEGATPPIEAALLDFPREQGAFESTVERSRPRPADILRVCKTQVAKLELWLQQANVAFEPETVDADMQQVVEEELAGCQAMLTEIEYKVASLLETCKDQGLGDCGTTQQEAEALSWKLKTVKCNLEKVQMVLQEKFSEDQHPSTLKKPSEPHDVDQPAGLSELDSVLTERPQFSRQKDAPQPQILELKPSEQKDLIKFTELNAKKTWLQGHQENEDANRQSASSSKVPSPGNAASDSTLPLQAQSGDKWQYLHHELTSRPNPSVPQLVEPQVALTTSTLPSVSVYNFRCPTADELQAYTTQLEELRQEANTIQTQGSMTEETYISLDKRLFELFLSLSRCLGSVEGLLQRPGLLREDACAQQVFFQKLALELKKLYLALGDKKDDFLKAVTWPGKEATLLPECIDALTVSLESVQSRAAWRDASLKAGLEHSRSYQNEVKRLYSQLIKKKTALQQSLNEISGQSISKQLQKADVHTAELQNSEKQVAKLRDEGERLRFPHGLLQDVYKLEDVLDSMWGILRARYLELSSPFLSKSLQTLLQGMAELVSIGKGKLAADPLQHAKSKAALQAQLQDHKAFFQKLVADMLLIQTYSATMFPPSLQKGEGFGAEQVAEVRALEEEACLRGAQLQSMLQKWEEFDDNYASLEKDLEALISSLPSVSLVEETEERLLERISFYQQIKRNIDGKHARLCQTLNEGRQLAASVSCPEPEGQIARLEEQWLSLNKRIDQELHRLQTLLKHLLSYSRDSDELTRWLETSQQTLNYWKEQSLNVSQDLNTIRSNIDRFFKFSKEVDERSSLKSAVMSTGNQLLHLKEADTATLRASLAQFEQKWTVLITQLPDIQEKLHQLQMEKLPSREAISEMISWMNAVEPQAAGKDTELSKSSASQVKHLLQKLKEFRMEMDYKQWVVDFVNQSLLQLSTCDVESKRYERTEFAEHLGEMNRQWQRVHGTLNRKIQHLEQLLESITENENKVQNLNSWLEAQEERLKMLQKPESAVSMEKLLLDCQDIENQLALKSKALDELRQSSLTMDGGDVPLLEDMASGIVELFQKKNNVTSQVHQLRASVQSVLQEWKACDKLYDEATMRTTQLTYSMEHSKPAVLSLQALACQVQNLEALQDEAENGERSWEKLQEVIGRLKASCPSMAGIIEEKCQDAHSRWTQVNQDLADQLQEARGQLQLWKAPHNAHAEAAAWLQQQEAKFQQLANTNLSGDNLADILPRALKDIKGLQSDLQKTKEAFLENSTLSDQLPQPEERSTPGLHSGQRHSLQTAAYLEKMLLAKSNEFEIVLAQFKDFTDRLAYSKDLIVHKEENLNKLYHEEKEEVPDLFLNHVLALTAQSPDIERLNEESLRLPLSDVTIKTLQSLNRQWIRATATALDHYSELQGNGLNEKFLHYCERWIQVLEKIQESLSVEVAHSLPALLEQQKTYEILEAEVSTNQAVADAYVTQSLQLLDTAEIEKRPEFVSEFSKLSDQWQRAARGVRQRKCDISRLVTQWRFFTTSVEDLLRFLADTSQLLSAVKEQDCYSLCQTRRLVHELKSKEIHLQRWRTTYALALEAGEKLRNTPSPETREFVDGQISRLQESWKDTELSLGEVISRLQSTAETWDQCKKKIKKLKKRLQALKAQSEDPLPELHEALHEEKELIKEVEKSLANWTHSLKELQTMKADLSQHILAEDVTVLKEQIQLLHRQWEDLCLRVAIRKQEIEDRLNSWIVFNEKNKELCAWLVQMENKVLQTADVSIEEMIEKLQKDCMEEISLFTENKLQLKQMGDQLIKASSKAKAAELEEKLSKINDRWQHLFDVIGSRVKKLKETFAFIQQLDKNMSNLRTWLARIESELSKPVVYDVCDNQEIQKRLAEQQDLQRDIEQHSAGVESVFNICDVLLHDSDACANETECDSIQQTTRSLDRRWRNICAMSMERRMKIEETWRLWQKFLDDYSRFEDWLKSAERTAACPNSSEVLYTNAKEELKRFEAFQRQIHERLTQLELINKQYRRLARENRTDTASKLKQMVHEGNQRWDNLQKRVTAILRRLRYFTNQREEFEGTRESILVWLTEMDLQLTNVEHFSESDAEDKMRQLNGFQQEITLNTNKIDQLIVFGEQLIQKSEPLDAVLIEDELEELHRYCQEVFGRVSRFHRRLTSHTPGLDDEKEASENETDIEDPREIQADSWRKRRESEEPTSPQSLCHLVPPALGHERSGCETPVSVDSIPLEWDHTGDVGGSSSHEDDEEGPFYSALSGKSISEGHPWHVPDSPSHSKHHYKHMEGDRTEAPVPTDASTPFKSDYVKLLLRQGTDDSKEGLKEAQQEDEQLATLTGQQPGAFDRWELIQAQELHSKLRLKQTVQQLKSDIGSIAAWLGKTEAELEALKLAEPPSDIQEIALRVKRLQEILKAFDTYKALMVSVNVSHKEYLPSQSPEATELQNRLHQLSLSWDSVQGVLDSWRGDLRQSLMQCQDFHQLSQDLLLWLATAESRRQKAHVTSPEADRQVLLECQKDLMRLEKELVARQPQVSSLREISSSLLVKGQGEDYIEAEEKVHVIEKKLKQLQEQVAQDLMSLQRSLDPDASLTSFDEVDSGEQLPAAFAKQFGVEEEEEEEETDSRMPHLDSPGSSQPRRSFLSRVIRAALPLQLLLLLLLLLACLLPASEDDYSCTQANNFARSFYPMLRYTNGPPPT

SEQ ID NO: 664 - protein, 155 aa, mus musculus
MGKNNSKLAPEVLEDLVQNTEFSEQELKQWYKGFLKDCPSGILNLEEFQQLYIKFFPYGDASKFAQHAFRTFDKNGDGTIDFREFICALSVTSRGSFEQKLNWAFEMYDLDGDGRITRLEMLEIIEAIYKMVGTVIMMRMNQDGLTPQQRVDKIF

SEQ ID NO: 665 - protein, 345 aa, mus musculus
  misc_feature (1)..(1): Xaa can be any naturally occurring amino acid
XKLGDCISRDSYPDGNITWYRNGKVLQPVEGEVAILFKKEIDPGTQLYTVTSSLEYKTTRSDIQMPFTCSVTYYGPSGQKTIYSEQEIFDIYYLDLSLNPSGEVTKQIGDTLPVSCTISASRNATVVWMKDNIRLRSSPSFSSLHYQDAGNYVCETALQEVEGLKKRESLTLIVEGKPQIKMTKKTDPSGLSKTIICHVEGFPKPAIHWTITGSGSVINQTEESPYINGRYYSKIIISPEENVTLTCTAENQLERTVNSLNVSAISIPEHDEADDISDENREKVNDQAKLIVGIVVGLLLAALVAGVVYWLYMKKSKTASKHVNKDLGNMEENKKLEENNHKTEA

SEQ ID NO: 666 - protein, 441 aa, mus musculus
KFHLGEAEMEERSFPNPFPDYEAAASAAGLAAGSAEETGRVCPLPTTEDPGLPFHPNGKIVPNFIKRIQTKIKDLLQQMEEGLKTADPHDCSAYTGWTGIALLYLQLYRVTGDQTYLLRSLDYVKRTLRNLSGRRVTFLCGDAGPLAVGAVIYHKLKSECESQECITKLLQMHRTIVCQESELPDELLYGRAGYLYALLYLNTEIGPGTVGETAIKEVVSAIIESGKSLSREERKSERCPLLYQWHRKQYVGAAHGMAGIYYMLMQPEAKVDQETLTEMVKPSIDYVRHKKFRSGNYPSSLSNETDRLVHWCHGAPGVIHVLLQAYQVFKEEKYLKEAMECSDVIWQRGLLRKGYGICHGTSGNGYSFLSLYRLTQDKKYLYRACKFAEWCLDYGAHGCRIPDRPYSLFEGMAGAVHFLSDILVPETARFPAFELGFLQKD

SEQ ID NO: 667 - protein, 212 aa, mus musculus
  misc_feature (1)..(1): Xaa can be any naturally occurring amino acid
XQTIQEDPTAASGGLDVMASQKRPSQRSKYLATASTMDHARHGFLPRHRDTGILDSIGRFFSGDRGAPKRGSGKVPWLKQSRSPLPSHARSRPGLCHMYKDSHTRTTHYGSLPQKSQHGRTQDENPVVHFFKNIVTPRTPPPSQGKGRGLSLSRFSWGAEGQKPGFGYGGRASDYKSAHKGFKGAYDAQGTLSKIFKLGGRDSRSGSPMARR

SEQ ID NO: 668 - protein, 150 aa, mus musculus
  misc_feature (1)..(1): Xaa can be any naturally occurring amino acid
XESDELQTIQEDPTAASGGLDVMASQKRPSQRSKYLATASTMDHARHGFLPRHRDTGILDSIGRFFSGDRGAPKRGSGKDSHTRTTHYGSLPQKSQHGRTQDENPVVHFFKNIVTPRTPPPSQGKGRGLSLSRFSWGGRDSRSGSPMARR

SEQ ID NO: 669 - protein, 471 aa, mus musculus
LRSPGTRSSRSCWSGTNLKLRELFEADPERFNNFSLNLNTNHGHILVDYSKNLVNKEVMQMLVELAKSRGVEAARDNMFSGSKINYTEDRAVLHVALRNRSNTPIKVVGKDVMPEVNRVLDKMKSFCQTLTTQETITNAETAKEWFLEAAKDPSAVAKHFVALSTNTAKVKEFGIDPQNMFEFWDWVGGRYSLWSATGPSIALHVGFDHFEQLLSGAHWMDQHFLKTPLEKNAPVLLALLGIWYINCYGCETHALLPYDQYMYRFAAYFQQGDMESNGKYITKSGARVDHQTGPIVWGEPGTNGQHAFYQLIHQGTKMIPCDFLIPVQTQHPIRKGLHHKILLANFLAQTEALMMGKLPEEARKELQAAGKSPEDLEKLLPHKVFEGNRPTNSIVFTKLTPFILGALIAMYEHKIFVQGIMWDINSFDQWGVELGKQLAKKIEPELEGSSAVTSHDSSTNGLISFIKQQWD

SEQ ID NO: 670 - protein, 4636 aa, mus musculus
PGALFMPVPDGSVAAAGLGLGLPTTDSRGHYQLLLSGRALADRYRRIYTTALSDRDQAGSSTGHPASRNKKILNKKKLKRKQKSKSKVKTRSKSENVENTVIIPDIKLHSNPSAFNIYCNVRHCVLEWQKKETSLAAASKNSVQSGESDSDEEEESREPPIKLPKIIEVGLCEVFELIKETRFSHPSLCLRSLQALLNVLQGQQPEGLQSEPPEVLESLFQLLLEITVRSTGMNDSTGQSLTALSCACLFSLVASWGETGRTLQAISAILTNNGSHACQTIQVPTILNSLQRSVQAVLVGKIQVQDWFSNGIKKAALMHKWPLKEVSVDEDDQCLLQNDGFFLYLLCKDGLYKIGSGYSGTVRGHIYNSTSRIRNRKEKKSWLGYAQGYLLYRDLNNHSMTAIRISPETLEQDGTVLLPDCHTEGQNILFTDGEYINQIAASRDDGFVVRIFATSTEPVLQQELQLKLARKCLHACGISLFDLEKDLHIISTGFDEESAILGAGREFALMKTANGKIYYTGKYQSLGIKQGGPSAGKWVELPITKSPKIVHFSVGHDGSHALLVAEDGSVFFTGSASKGEDGESTKSRRQSKPYKPKKIIKMEGKIVVYTACNNGSSSVISKDGELYMFGKDAIYSDSSSLVSDLKGHFVTQVAMGKAHTCVLMKNGEVWTFGVNNKGQCGRDTGAMNQGGKGFGVENMATAMDEDLEEELDEKDEKSMMCPPGMHKWKLEQCMVCTVCGDCTGYGASCVSSGRPDRVPGGICGCGSGESGCAVCGCCKACARELDGQEARQRGILDAVKEMIPLDLLLAVPVPGVNIEEHLQLRQEEKRQRVIRRHRLEDGRGPLVFAGPIFMNHREQALARLRSHPAQLKHKRDKHKDGSGDRGEKDASKITTYPPGSVRFDCELRAVQVSCGFHHSVVLMENGDVYTFGYGQHGQLGHGDVNSRGCPTLVQALPGPSTQVTAGSNHTAVLLMDGQVFTFGSFSKGQLGRPILDIPYWNAKPAPMPNIGSKYGRKATWIGASGDQTFLRIDEALINSHVLATSEIFASKHIIGLVPASISEPPPFKCLLINKVDGSCKTFNDSEQEDLQGFGVCLDPVYDVLWRFRPSTRELWCYNAVVADARLPSATDMQSRCSILSPELALPTGSRALTTRSHAALHILGCLDTLAAMQDLKMGIASTEEETQAVMKVYSKEDYSVVNRFESHGGGWGYSAHSVEAIRFSADTDILLGGLGLFGGRGEYTAKIKLFELGPDGGDHETDGDLLAETDVLAYDCAAREKYAMMFDEPVLLQAGWWYVAWARVSGPSSDCGSHGQASITTDDGVIFQFKSSKKSNNGTDVNAGQIPQLLYRLPTSDGSTSKGKQQTSEPVHILKRSFARTVSVECFESLLSILHWSWTTLVLGVEELRGLKGFQFTATLLDLERLRFVGTCCLRLLRVYTCEIYPVSATGKAVVEETSKLAECIGKTRTLLRKILSEGVDHCMVKLDNDPQGYLSQPLRLLEAVLQECHNTFTACFHSFYPTPALQWACLCDLLNCLDQEANFKTSSSRLLAAVMSALCHTSVKLTSLFPIAYDGEVLLRSIVKQVSTENDSTLVHRFPLLVGHMEKLSQSEENISGMTSFREVLEKMLVIVVLPVRNSLRRESELFSSHLVSNTCGLLASIVSELTASALGSEVDGLNSLHSVKASANRFTKTSQGRSWNTGNGSPDAICFAVDKPGIVVVGFAVYGGGGIHEYELEVLVDDSEHAGDSTHSHRWTSLELVKGTYTTDDSPSDIAEIRLDKVVPLKENVKYAVRLRNYGSRTANGDGGMTTVQCPDGVTFTFSTCSLSSNGTNQTRGQIPQILYYRSEFDGDLQSQLLSKANEEDKNCSRALSVVSTVVRAAKDLLHRALAVDADDIPELLSSSSLFSMLLPLIIAYIGPVAAAIPKVAVEVFGLVQQLLPSVAILNQKYAPPAFNPNQSTDSTTGNQPEQGLSACTTSNHYAVIESEHPYKPACVMHYKVTFPECVRWMTIEFDPQCGTAQSEDVIRLLIPVRTIQNSGYGAKLTSVHENLNSWVELKKYSGSSGWPTMVLVLPGNEALFSLETASDYVKDDKASFYGFKCFAIGYEFSPGPDEGVIQLEKELANLGGVCAAALMKKDLALPVGNELEEDLEILEEAALQVCKTHSGILGKGLALSHSPTILEALEGNLPLQIQSNEQSFLDDFIACVPGSSGGRLARWLQPDSYADPQKTSLILNKDDIRCGWPTTITVQTKDQYGDVVHVPNMKVEVKAVPVSQKKTSLQQDQGKKCQRIPGSPSAAASSADMTFGGLASPKLDVSYEPMIVKEARYIAITMMKVYENYSFEELRFASPTPKRPSENMLIRVNNDGTYCANWTPGAIGLYTVHVTIDGIEIDAGLEVKVKDPPKGMIPPGTQLVKPKADPQPNKIRKFVAKDSAGLRIRSHPSLQSEQIGIVRVNGTITFIDEIHNDDGVWLRLNEETIKKYVPNMNGYTEAWCLSFNQHLGKSLLVPVDEPKTNTDDFFKDMNSCGPQEATMQERDHPFLRGGPGMYKVVKTGPSGHNIRSCPNLRGIPIGMLVLGNKVKAVGEVTNSEGAWVQLDKNSMVEFCESDEGEAWSLARDRGGNQYLRHEDEQVLLDQNSQPPPPSPFSVQAFNKGASCSAQGFDYGLGNNKGDRGTISTSSRPVSTSGKSELPSKHSRSVKPDGHVSRTPADQKKPRGTEGLSASESLMLKSDAAKLRSDSHSRSLSPNHNTLQTLKSDGRTSSGFRAESPGPGSRSSSPKPKPLPTPRSSPSGASSPRSSSPQDKNLPQKSTAPAKTKLDPPRERSKSDSYTLDPDTLRKKKMPLTEPLRGRSTSPKPKPVPKDPKDSPGSENRAPSPHVVQENLHSEVVEVCTSSTLKTNGVTDSTCDDSGDLKSVDEGSNKVHFSIGKAPLKDEQEMRASPKISRKCANRHTRPKKEKSNFLFKGDGTKSLEPAKQAMSPSVAECARAVFASFLWHEGIVHDAMACSSFLKFNPDLSKEHAPIRSSLNSQPPTEEKEIKLKNRHSLEISSALNMFNIAPHGPDISKMGSINKNKVLSMLKEPPLHEKCEDGKSEATFEMSMHHTMKSKSPLPLTLQHLVAFWEDISLATIKAASQNMIFPSPGSCAVLKKKECEKENKKTKKEKKKKEKTEIRPRGNLFGEMAQLAVGGPEKDTICELCGESHPYPVTYHMRQAHPGCGRYAGGQGYNSIGHFCGGWAGNCGDGGMGGSTWYLVCDRCREKYLREKQAAAREKVKQSRRKPMQVKTPRALPTMEAHQVIKANALFLLSLSSAAEPSILCYHPAKPFQSQLPIVKEGVSEDLPVKMPCLYLQTLARHHHENFVGYQDDNLFQDEMRYLRSTSVPAPYISVTPDASPNVFEEPESNMKSMPPSLETSPITDTDLAKRTVFQRSYSVVASEYDKQHSILPARVKAIPRRRVNSGDTVGSSLLRHPSPELSRLISAHSSLSKGERNFQWPVLAFVIQHHDLEGLEIAMKQALRKSACRVFAMEAFNWLLCNVIQTTSLHDILWHFVAALTPSPVEAEEDEDEDNKSNKENAEQEKDTRVCEHPLSDIVIAGEAAHPLPHTFHRLLQTISDLMMSLPSGSSLQQMALRCWSLKFKQSDHQFLHQSNVFHHINNILSKSDDGDSEESFSISVQSGFEAMSQELCIVMCLKDLTSIVDIKTSSRPAMIGSLTDGSTETFWESGDEDKNKTKNITINCVKGINARYVSVHVDNSRDLGNKVTSMTFLTGKAVEELCRIKQVDLDSRHIGWVTSELPGGDNQIIKIELKGPENTLRVRQVKVLGWKDGESTKIAGQISASVAQQRSCEAETLRVFRLITSQVFGKLISGDAEPTPEQEEKALLSSPEGEEKATSDADLKEHMVGIIFSRSKLTNLQKQVCAHIVQAIRMEATRVREEWEHAISSKENANSQPSDEDASSDAYCFELLSMVLALSGSNVGRQYLAQQLTLLQDLFSLLHTASPRVQRQVTSLLRRVLPEVTPNRLASIIGVKSLPPADISDIIHSTEKGDWNKLGILDMFLGCIAKALTVQLKAKGTTITGTAGTTVGKGVTTVTLPMIFNSSYLRRGESHWWMKGSTPTQISEIIIRLIKDMAAGHLSEAWSRVTKNAIAETIIALTKMEEEFRSPVRCIATTRLWLALASLCVLDQDHVDRLSSGRWMGKDGQQKQMPMCDNHDDGETAAIILCNICGNLCTDCDRFLHLHRRTKTHQRQVFKEEEEAIKVDLHEGCGRTKLFWLMALADSKTMKAMVEFREHTGKPTTSSSEACRFCGSRSGTELSAVGSVCSDADCQEYAKIACSKTHPCGHPCGGVRNEEHCLPCLHGCDKSATTLKQDADDMCMICFTEALSAAPAIQLDCSHVFHLQCCRRVLENRWLGPRITFGFISCPICKNKINHIVLKDLLDPIKELYEDVRRKALMRLEYEGLHKSEAITTPGVRFYNDAAGYAMNRYAYYVCYKCRKAYFGGEARCDAEAGQGDDYDPRELICGACSDVSRAQMCPKHGTDFLEYKCRYCCSVAVFFCFGTTHFCNACHDDFQRMTSIPKEELPHCPAGPKGKQLEGTECPLHVVHPPTGEEFALGCGVCRNAHTF

SEQ ID NO: 671 - protein, 191 aa, mus musculus
  misc_feature (1)..(1): Xaa can be any naturally occurring amino acid
XDAPGREDNTFKDRPSESDELQTIQEDPTAASGGLDVMASQKRPSQRSKYLATASTMDHARHGFLPRHRDTGILDSIGRFFSGDRGAPKRGSGKVPWLKQSRSPLPSHARSRPGLCHMYKDSHTRTTHYGSLPQKSQHGRTQDENPVVHFFKNIVTPRTPPPSQGKGRGLSLSRFSWGGRDSRSGSPMARR

SEQ ID NO: 672 - protein, 60 aa, mus musculus
  misc_feature (1)..(1): Xaa can be any naturally occurring amino acid
XDRERIQEGAAVLQKMLLEDELQDAVLLLFANKQDLPNAMAISEMTDKLGLQSLRNRTTY

SEQ ID NO: 673 - protein, 193 aa, mus musculus
  misc_feature (1)..(1): Xaa can be any naturally occurring amino acid
XPSESDELQTIQEDPTAASGGLDVMASQKRPSQRSKYLATASTMDHARHGFLPRHRDTGILDSIGRFFSGDRGAPKRGSGKDSHTRTTHYGSLPQKSQHGRTQDENPVVHFFKNIVTPRTPPPSQGKGRGLSLSRFSWGAEGQKPGFGYGGRASDYKSAHKGFKGAYDAQGTLSKIFKLGGRDSRSGSPMARR

SEQ ID NO: 674 - protein, 1994 aa, mus musculus
LSYIEEDGVNIFERISMHPTAKHVNRKKSPLSCAPKIKRFKVDLEEQSKKKHESSRGKVMLLRETCSVITSSDVFKLDISEEVETETMQSHVPYPVLQKPLPVGQVGSTKTIDNNFTKRKLHPPWEEEVQTSAIENLTYLRGPIFMTKISAPPCVSSVKKHRTLSQKTHQWNSNEKTGQKQERTRHRNVVATKRDASIPLLTTGQIASTKQISECSKRKILLPVQEEVQTPTTDGSTYSSDIVLKAKISAPIHVFSLSEHSTPRKRKTPHGKIKKKIRQKQEKARKFNMYVMKTDSSIPSRASKKKDILGKVQFSLPPSKVKDASASDKTTYMKSSGYVLKNIKKPTQEEGRNRFRKDVKDEKIPKSIDQKVKKLPQSCTLTMKELQSKTQGEKLSDLARIVLKLCTSQLQLNKFLDSQIADRKVYSEIKLLKEHVPQKEKVGKKKHVGVSSVVHPKNIHLKTKSSPILPMQNLSDFQWKASKQGGKVREDRSDSRRTLTKKLTATSPQPNSGNTRIKEACVSMLTSPSVSMGYFQKSKDSEEGIYIQSIAGSSSISLHSEKHMSEEKGEAGMQIAKPVAHKYQQAKVQKLKDEQGLVLIKSPLLLDLPHPQLCEKTEFSTTKLRLTNPALQSISTEGKTERREVGITVGGTMKDAKQHPMPQREDTYRKEKIEIIDRRGTDITLKSRKSLLSQKLHRSELHMNIKAPQPKKYDDDESESRVLRKMYTSKASLVSITRCERVHVADGDHLLDGLESKPPSPLPQIVTALSDMEKMTHKEDMCTNVRKGKQYSKQIEKTVDLTVEMPFKKAKVSPISLLLNTNKFVLNMKVLEKKVHENKSELTTVASRTFLSIPSPDSRYSQDKTQKDTAGFTKSPHPQENFQEPSDAQDTATSELTEVDYKCIVKATEHNVLLQQNRSQTSKCVTSALRLSHHPHIKSQRKPTFPHHKIDFTRLGIIIGEKVLDMSFKWQKGQLGKYKKELLTKNLNWKTENEIKDNLSYKAKFSVSPIFSLEKIPLKKLSSVHSSKFQGKGDQSVMMIEQGKPKAFPFLNVPVPNRNQINVGRKPVVNISPQTQSRVRMSNKAVCDKRRKLGPPLTVTAKKNLQGQKLFQTNNLNSLYAYAPICPKSQKNRFTVTNLKRELRPKYSTMRIPKYPISKILGSPSRKRKLEYAFNKPKTVVPRSNDIPSEIIISSLSVSMINPNEKIVESKPNSRREFQEKLPDASKIKDILIHRNSFDTGEAAPGTVHIFPDKNNENKALAEHLFPIYKILKSVFEVPVENKIQTRVLSEILEEVQAYKPGAAKAPPLPETSDTSSKICATLLHTPLLKQPTPELKNKLTMHLVSKASEIKLNQIPDMVNTSLQNRDSRPQGTISKDNSYPFYLKHIKMNLKSPKVDTIHANLKNNYESDFPSLSCVKTPTTNVSSSNRKALTEPKDIKKQESVTPLASLSNFPFIHVLNKFSEKEKDSLLGHLCTKTVEIHTMGLPSIATKSYAIANGQDKSKPLFKCIHTATKGPKRTNQVLVLFDEKSFCEIDCDLQHKYLRSLSKPSVTVVSMPNAPPKHTSRISKGSGSVCKTGHGSKESSTLSFDKKLLQHVSLPKIIPQESSLCFRKFQEPTNVPDFYPGLRDTEQNDVFLSDLKLQMTPEKNKKCHVWFQETSAYKHSASGTQQNTADLASSLSSWISDGTNVSLNTETSTDTVECQALEESNSEECVFIEANLYLTQDSQNFLSEVPKGIPLTDIHIGDKETYLKPFSHKDPNDSHTRTHRQHIFPVAQPFYQSQNSRKCRSNSKMQPPDWLSHSSSSTVEIESTSSSIMFSDEKHWTKTTWRRTSYSLTSSTTESSIKLSLAKTHGKSHMYPQLMDRNKARSDLWKKSRIYQNSHYSHLRSKERQTKKKRQTNQMPEPNAHWQNIKFYSERRENQPFFYVCVPADSMDVIPKTVRWVIPNKILGKRNFQIPQVANISKSWNLWSSSKKLLGSLTGAFNAIRYG

SEQ ID NO: 675 - protein, 109 aa, mus musculus
  misc_feature (1)..(1): Xaa can be any naturally occurring amino acid
XINEILNIRTKGRTFYVMSLTLCRFLVWNYFAQFRLEILQLTRHPENWTLQARWRLIGLPIHMLFLRFYRRDKEDLYRTFDAFSTFYLNSSGLICRHHLDKVSVGRGKG

SEQ ID NO: 676 - protein, 177 aa, mus musculus
  misc_feature (1)..(1): Xaa can be any naturally occurring amino acid
XLCKGCSWLGDVAARVWTCICVHMCGRGAFSVVRRCVKVLAGQEYAAKIINTKKLSARDHQKLEREARICRLLKHPNIVRLHDSISEEGHHYLIFDLVTGGELFEDIVAREYYSEADASHCIQQILEAVLHCHQMGVVHRDLKPENLLLASKLKGAAVKLADFGLAIEVEGEQQAWF

SEQ ID NO: 677 - protein, 638 aa, mus musculus
  misc_feature (1)..(1): Xaa can be any naturally occurring amino acid
XAQPWHSCHKLIYVRPNSKTGVPVGHWPIPESFWPEQNLPSLPPRTSHPVVRFSCVDCEPMVIDKLPFDKYELEPSPLTQYILERKSPHTCWQVFVTSSSKYNELGYPFGYLKASTTLTCVNLFVMPYNYPVLLPLLDDLFKVHKLKPNLKWRQAFDSYLKTLPPYYLIPLKKALRMMGAPNLISDNLDCGLSYSVISYLKKLSQQTKLESDQILASVGKKPPQEIGIKVKNHSACGLPLAHNKSFRKLLKEIIGESAPRLTELNPKEFAGFQVGLLNKDLKPQTYRNAYDIPRRGLLDQLTRMRSNLLQTRKFIVGQDEDSLHSVPVAQMGNYQEYLKMLASPLRELDPDQPKRLHTFGNPFKQDKKGMMIDEADEFVVGPQNKVKRPGEPNSPMSSKRRRSMSLLLRRAQTAPTVTNHVGGKGPLSASWFPSCPSLVKHTFGHPDTTVIHDTHEEKMENGQSPPDGFLLKSAPAEFMNVSGESFISSQLDSLSDDFTGLRKDGFIHKPGNNILLGGAKTCSLSVADQKITMASALETVPNSMQITPAMAQGINADIKHQLMKEVRKFGRKYERIFILLEEVQGPLETKKQFVEFTIKEAARFKRRVLIQYLEKVLEKIDSHHLLNNVNHINSRSSC

SEQ ID NO: 678 - protein, 285 aa, mus musculus
  misc_feature (1)..(1): Xaa can be any naturally occurring amino acid
XRLRREGPRLKPKADQSGGTRVAAAETRRRTPDPARRSPSLAMEKTELIQKAKLAEQAERYDDMATCMKAVTEQGAELSNEERNLLSVAYKNVVGGRRSAWRVISSIEQKTDTSDKKLQLIKDYREKVESELRSICTTVLELLDKYLIANATNPESKVFYLKMKGDYFRYLAEVACGDDRKQTIENSQGAYQEAFDISKKEMQPTHPIRLGLALNFSVFYYEILNNPELACTLAKTAFDEAIAELDTLNEDSYKDSTLIMQLLRDNLTFTCVELETVSVCFSLLS

SEQ ID NO: 679 - protein, 129 aa, mus musculus
GAILTTMLATRNFSAAKSLLKKPDGVKEPQTTVIHNPDGNKESTESSNTTIEDEDVKARKQEIIKVTEQLIEAINNGDFEAYTKICDPGLTAFEPEALGNLVEGMDFHRFYFENALSKSNKPIHTIILN

SEQ ID NO: 680 - protein, 135 aa, mus musculus
MLWVWGQPGLFPQISRSSSGIRAQLIAWGAELFPLQICKTATHAGTARELPAEFDKAAEEVKRLKTQPTDEEMLFIYSHFKQATVGDVNTDRPGLLDLKGKAKWDSWNKLKGTSKESAMKTYVEKVDELKKKYGI

SEQ ID NO: 681 - protein, 213 aa, mus musculus
  misc_feature (1)..(1): Xaa can be any naturally occurring amino acid
XATVLREPGGGLRLLRFLCSELQAARLLHLRLQRDSSPVPSFGEGTKKANGVVQELTLTLQALGLPRPLRGTLASQLLREFHDKISELLPSLPPESMKPLLNSQLDASRWAHGEVMKAVLSPIRGLLTPESDVSIAHVLAARADLSRLVPATSVAARRGTSCAINKVLMGDVPDRGGRPSELEAPMPTWKSRREDGGRGKAGQQRWGRRKKKK

SEQ ID NO: 682 - protein, 22 aa, mus musculus
RCPITLVERLFVVNGWSVSVLA

SEQ ID NO: 683 - protein, 182 aa, mus musculus
  misc_feature (1)..(1): Xaa can be any naturally occurring amino acid
XAYRTDESQPWVLPVVRKVEQKIANDNSLNHEYLPILGLAEFRSCASRLVLGDNSLAIRENRVGGVQSLGGTGALRIGADFLGRWYNGTDNKNTPIYVSSPTWENHNAVFSAAGFKDIRPYCYWDAEKRGLDLQGFLNDLENAPEFSIFVLHACAHNPTGTDPTPEQWKQIAAVMQMREWGI

SEQ ID NO: 684 - protein, 1151 aa, mus musculus
  misc_feature (1)..(1): Xaa can be any naturally occurring amino acid
XALGKGRRRSFRKKREKPRMEPWKSHPGDSKGPDSEDVTIPGGVDLLALPQLCFPGCVCVASEPKEDYIHFLVLTDVCGNRTYGVVAQYYRPLHDEYCFYNGKSHWEPSVISARCFVPFAVCVVSRFPYYNSLKDCLSCLLTHLKLCKDFEVDNHIKDFAARLSLIPSPPPGPLHLIFNMKPLQVVFPSRADPESPIVDLDLHLPLLCFRPEKVLQILTCILTEQRIVFFSSDWALLTLMAECFVAYLHPLQWQHTFVPILSGQMLDFVMAPTSFLMGCHLDHFEEVRKEADGLVLIDIDHGSVTCSKSSDDNIDIPDVPLLLAQTFIQREVKNHLNYEHRVFNSEEFLKTRAAGDQQFYKQVLDTYMFHSFLKARLNGRMDAFARMDLDTQSEEDRIDRMLISPRRPTVEKMASRKASPLHITHRRMVVSMPNLQDISLPELPPRNSSLRIMDTSNCRSSSPVLKVTPKSTYMFKIPDIHFPLESQCVQAYYTDFVTLLSKAMALLGPGDSLLLARYFYLRGLLHLMQGQLLSALLDFQNLYKTDIGIFPADLVKRTVESMSASERAQAERTPELRRLITEVFDKHGEAPKADDAVKNFELPKKHMQLNDFVKRVQESGIVKDAVIIHRLFDALTFGHEKQIDPETFRDFYTCWKETEAEAQEVSLPALLMEHLDKNECVYKLSSSVKTNRGVGKIAMTQKRLFLLTEGRPGYVEIATFRNIEEVKNSTVAFLLLRIPTLKIKTVAKKEVFEANLKSECDLWHLMVKEMWAGKQLADDHKDPQYVQQALTNVLLMDAVVGTLQSPSAIHAASKLAYFDNMKKKSPMAVPKTTSETLKHKINPSAGETAPQAIEVLLYTPGRLDPAEKVEDAHPKLWCALNEGKVVVFDASSWTVHQHCFKVGSSKVNCMVMAEHNQVWVGSEDSVIYIINVHSMSCNKQLTDHRSPVTGLAVHNGKKPSEIYSCSLDGTVIAWNVSTLRVISRFQLSYGDLLSISLHNDRIWCCTVHKILVVTPQGFVRQELKHPKDASFLAFQLLPEEQQLWAASTGVSELYMWSLKDLDQPPQKTYLQDCSEVTCMIRVKRQIWVGGRGLSQGKTRGKIYVMDVEKVTVEKELVAHLDTVRTLCSAEDRYVLSGAGQEEGKIAIWKVE

SEQ ID NO: 685 - protein, 118 aa, mus musculus
  misc_feature (1)..(1): Xaa can be any naturally occurring amino acid
XGGSARSGVYTKCYFEGFCSGQNTSNSSRKRDARKRKPPPEKTAADKEKPEACAISGLFNCVTIHPLNIAAGVWMIMNAFILLLCEAPFCCQFVEFANTVAEKVDRLRSWQKAVFYCG

SEQ ID NO: 686 - protein, 1388 aa, mus musculus
MSRPPPTGKMPGAPETAPGDGAGAGRQRKLEALIRDPRSPINVESLLDGLNSLVLDLDFPALRKNKNIDNFLNRYEKIVKKIRGLQMKAEDYDVVKVIGRGAFGEVQLVRHKASQKVYAMKLLSKFEMIKRSDSAFFWEERDIMAFANSPWVVQLFCAFQDDRYLYMVMEYMPGGDLVNLMSNYDVPEKWAKFYTAEVVLALDAIHSMGLIHRDVKPDNMLLDKHGHLKLADFGTCMKMDETGMVHCDTAVGTPDYISPEVLKSQGGDGYYGRECDWWSVGVFLFEMLVGDTPFYADSLVGTYSKIMDHKNSLCFPEDTEISKHAKNLICAFLTDREVRLGRNGVEEIKQHPFFKNDQWNWDNIRETAAPVVPELSSDIDSSNFDDIEDDKGDVETFPIPKAFVGNQLPFIGFTYFRENLLLSDSPPCRENDAIQTRKSEESQEIQKKLYALEEHLSSEVQAKEELEQKCKSINTRLEKTAKELEEEITLRKSVESTLRQLEREKALLQHKNAEYQRKADHEADKKRNLENDVNSLKDQLEDLKKRNQSSQISTEKVNQLQKQLDEANALLRTESDTAARLRKTQAESSKQIQQLESNNRDLQDKNCLLETAKLKLEKEFINLQSALESERRDRTHGSEIINDLQGRISGLEEDLKTGKALLAKVELEKRQLQEKLTDLEKEKSNMEIDMTYQLKVIQQSLEQEEAEHKTTKARLADKNKIYESIEEAKSEAMKEMEKKLLEERSLKQKVENLLLEAEKRCSILDCDLKQSQQKLNELLKQKDVLNEDVRNLTLKIEQETQKRCLMQNDLKMQTQQVNTLKMSEKQIKQENNHLMEMKMNLEKQNTELRKERQDADGQMKELQDQLEAEQYFSTLYKTQVRELKEENEEKTKLCKELQQKKQDLQDERDSLAAQLEITLTKADSEQLARSIAEEQYSDLEKEKIMKELEIKEMMARHKQELTEKDTTIASLEETNRTLTSDVANLANEKEELNNKLKDSQEQLSKLKDEEMSAAAIKAQFEKQLLNERTLKTQAVNKLAEIMNRKEPVKRGSDTDVRRKEKENRKLHMELKSEREKLTQQMIKYQKELNEMQAQIAEESQIRIELQMTLDSKDSDIEQLRSQLQALHIGMDSSSIGSGPGDAEPDDGFPESRLEGWLSLPVRNNTKKFGWVKKYVIVSSKKILFYDSEQDKEQSNPYMVLDIDKLFHVRPVTQTDVYRADAKEIPRIFQILYANEGESKKEPEFPVEPVGEKSNYICHKGHEFIPTLYHFPTNCEACMKPLWHMFKPPPALECRRCHIKCHKDHMDKKEEIIAPCKVYYDISSAKNLLLLANSTEEQQKWVSRLVKKIPKKPPAPDPFARSSPRTSMKIQQNQSIRRPSRQLAPNKPS

SEQ ID NO: 687 - protein, 1678 aa, mus musculus
MDCLLELSATDAKGAESSAQTSGDRDSKPGAAGNSVMETCHPEGEGEDSKLDSFLDMQLTEDLDSLIQNAFEKLNSPPDDQVYPFSPLQDANSFNDPSTFMNSDSSGMTSLLSVQSTSSNSETLKSSASLPGSNPPTSHSVLNAPESCAKLALEGGYSEGSPLSSSGNPTNGSVRGCGNFSQRQKDLSESECPSAQHSQALADLGNSDPQAPSTHPLHNSGSDLPGTDGDQKSASAPDVFVPSEGFNFKPHKHPELPPKGKDMNYCPVLTPLPLLLPPPPPPPIWNPMIPAFDLFQGNHGFVAPVVTTAAHWRPVNYTFPPPIISHNSPTKVWRGGEGASAYQVQEAPASQPVRKKATSFVGLVLVLLRGLPGSGKSFLARTLQEDNPGGVILSTDDYFYINGQYQFDVKYLGEAHEWNQNRAKEAFEKKVSPVIIDNTNLQAWEMKPYVALSQKHKYKVLFREPDTWWKFKPKELARRNIHGVSKEKISRMLEHYQRFVSVPIIMSSSDPEKTERIELCAYASDDSPRDSEAISSAKEDSVSSASPKHSELTEEKTLEVATQAVLSVRDPQLPCPGLNRGRKELGDVSHGGHNPFFQEAPSTYFPNPESKGQATDRSEEEQEMVSEKEHCEADAWRPAGGASSDGRCADDNQEACGSAGAAALPGETPSPPEMLEERTAGKKKTIGKQKGKSSLEKIPKQELSNFVGDWPVDKTISQRTKRNRKTEKGLSVQSDKKGNLPQSHKVLDARVSVNTDPVQPQGSSHGNDDLSEVPSSYHYDPYRSTEQSSLSAVSDWPSSASLAPREHRPRMPKADLSEPSVEFGTNDNLGEIPLYPAHEAYWGTSPEELKTLSSSLRSSEMLPSQTAPEHHPTSLNPLAHSQHALPLTFPSSAAALPGVVGPRSLTEFPVGVSGIVSGVDTGTCTQTEPQDFALLWKIEKNKINVSDSVRVLTGRLDGFKPKDFTLNRKVNVQETIPYRVMHDKSTFVEESELTSADESENLNILCKLFGSFSLEALKDLYERCNKDIIWATSLLLDSETKLCEDTAVESSPKSYSESQVGPFSMGLDLKEIISHRGTSEGSNSSVSEFSPGIGIRNTSARSAGNPGKGTSEQEGRRAMNPENPELITRVFPNAAVKVKSNNETLPDRQAELPGAYTFKQPLSLTPRSYIPKDVSEIEKNLVMTETRDNMHSFLNLSDIINSATSTSNPELNEDVYLTGSLEVKKNENLPKDYVKFANMEEFINEDKQEMEKNLMPGSGWSAGVSEEGKAEVLTPTPVTATSLTIDCLELALPPELAFQLNELFGPVGIDSGSLTVEDCVVHIDLNLAKVIHEKWRESVMERQRQEEVSRGKRTQDPLLAGHTGLDNFEQKSSQKTGKRLLKTLAAPETLDHWNTQTKKVSLREIMSEEIALQEKHDLKRETLMFEKDCATKLKEKQLFKIFPAINQNFLVDIFKDHSYSLENTVQFLNCVLEGDPVKTVVAQECVHQNENNTYTAQKSKEKKAKKPKEAEDSPGDPSFQDFEYPEYDDYRAEAFLHQQKRMECYSKAKEAYRMGKKNVATFYAQQGSLHEQKMKEANHLAAVEIFEKVNASLLPQNVLDLHGLHVDEAIEHLTAVLQQKTEEFKQSGGKPYLSVITGRGNHSQGGVARIKPAVIKYLTSHSFRFSEIKPGCLKVMLK

SEQ ID NO: 688 - protein, 663 aa, mus musculus
MNGDTRAAVVTSPPPTTAPHKERYFDRVDENNPEYLRERNMAPDLRQDFNMMEQKKRVSMILQSPAFCEELESMIQEQFKKGKNPTGLLALQQIADFMTASVPNVYPAAPQGGMAALNMSLGMVTPVNDLRGSDSIAYDKGEKLLRCKLAAFYRLADLFGWSQLIYNHITTRVNSEQEHFLIVPFGLLYSEVTASSLVKVNLQGDIVDRGSTNLGVNQAGFTLHSAVYAARPDAKCIVHIHTPAGAAVSAMKCGLLPISPEALSLGDVAYHDYHGILVDEEEKILIQKNLGPKSKVLILRNHGLVSVGESVEEAFYYIHNLVVACEIQVRTLASAGGPDNLVLLDPGKYKAKSRSPGTPAGEGSGSPPKWQIGEQEFEALMRMLDNLGYRTGYPYRYPALRERSKKYSDVEVPASVTGHSFASDGDSGTCSPLRHSFQKQQREKTRWLHSGRGDDASEEGQNGSSPKSKTKVWTNITHDHVKPLLQSLSSGVCVPSCITNCLWTKEDGHRTSTSAVPNLFVPLNTNPKEVQEMRNKIREQNLQDIKTAGPQSQVLCGVMMDRSLVQGELVTASKAIIEKEYQPHVIVSTTGPNPFNTLTDRELEEYRREVERKQKGSEENLDETREQKEKSPPDQSAVPNTPPSTPVKLEEAGDGCAKEYLLP

SEQ ID NO: 689 - protein, 189 aa, mus musculus
MLLFLTLWALVPCLVLLTLYFLSSTGGKSGGNKKNDGVKESSESTNTTIEDEDTKVRKQEIIKVTEQLIEAISNGDFESYTKMCDPGMTAFEPEALGNLVEGLDFHRFYFENLWSRNSKPVHTTILNPHIHLMGDESACIAYIRITQYLDAGGIPRTAQSEETRVWHRRDGKWQIVHFHRSGAPSVLPH

SEQ ID NO: 690 - protein, 489 aa, mus musculus
MATITCTRFTEEYQLFEELGKGAFSVVRRCVKVLAGQEYAAKIINTKKLSARDHQKLEREARICRLLKHPNIVRLHDSISEEGHHYLIFDLVTGGELFEDIVAREYYSEADASHCIQQILEAVLHCHQMGVVHRDLKPENLLLASKLKGAAVKLADFGLAIEVEGEQQAWFGFAGTPGYLSPEVLRKDPYGKPVDLWACGVILYILLVGYPPFWDEDQHRLYQQIKAGAYDFPSPEWDTVTPEAKDLINKMLTINPSKRITAAEALKHPWISHRSTVASCMHRQETVDCLKKFNARRKLKGAILTTMLATRNFSGGKSGGNKKNDGVKKRKSSSSVQLMESSESTNTTIEDEDTKVRKQEIIKVTEQLIEAISNGDFESYTKMCDPGMTAFEPEALGNLVEGLDFHRFYFENLWSRNSKPVHTTILNPHIHLMGDESACIAYIRITQYLDAGGIPRTAQSEETRVWHRRDGKWQIVHFHRSGAPSVLPH

SEQ ID NO: 691 - protein, 3411 aa, mus musculus
MPKLLESIVTVIDVFYQYATEYGNCDMLSKEEMKELLVTEFHQILKNPDDPDTVDIIMQNLDRDHNHKVDFTEYLLMILKLTKACNKIIGKDYCQASGSKQKNHSHQHQEEQSKKETENKEQKGSLSSSAGENDSYSRGSRGSNKSKSKKLRKGKEQSSKQTTKSNSSDHENSEDYEQGQHESGFSNSSGNGRPSSRKASGFPQPGSEPGQSSSSSTKGSGECYSSGNGKHGSSSGGSAVSGSGHSNTYGKQGTGSRHSSSNRRSRSTSRESSGSQEYSSGSSEEPGFTHGSGRKNSSTCGKNGSYSGQSTGRHQQGFGSSHELESGQSITSANHGSHSNQSSCSGTRECGSSESSMKKTHVSGSGHSSSTGKYTSTSGQNYNSTRQGCGQGKSSGSEQYGASSGQSSGCSSGQSTRYGEQGSGSRNSSTQSRGRSTSRESSTSQQFGSGSGRSSGFSQGGSGQGRSSRGGQQGSFSGQTEGSQQHGSCCGQSSGYGQNEYGSGHSASSGQQGSHYSQSSSYGTHNSGGSPSSSQRGHGSRSGRSSGLGQYGSPSGQTSSSTRQGSGQGQASGSGRYGASSGQTSGCGSGQSTRYGEQGSGSRNSSTQSRGRSTSRESSTSQRYGSGSGESSGFSQGGSGQGRSSRGGQQGSFSGQTSGRSQHQSGSRHGSGSGQFPISGQQGSHHGHSSSSGTHNSGSSQSSSTQWSHGSGSEQSSGLGHYGSTSGQTASSTRQGSGQGQASGSGRCGASSGQTSGCGSGQSTRYGEQGSGSRNSSTQSRGRSTSRESSTSQRYGSGSGGSSGFSQGGSGQGRSSRGGQQGSFSGQTEGSQQHGSCCGQSSGYGQNEYGSGHSASSGQQGSHYSQSSSYGTHNSGGSPSSSQRGHGSRSGRSSGLGQYGSPSGQTSSSTRQGSGQGQASGSGRYGASSGQTSGCGSGQSTRYGEQGSGSRNSSTQSRGRSTSRESSTSQRYGSGSGESSGFSQGGSGQGRSSRGGQQGSFSGQTSGRSQHQSGSRHGSGSGQFPISGQQGSHHGHSSSSGTHNSGSSQSSSTQWSHGSGSEQSSGLGHYGSTSGQTASSTRHRSGQGQASGSGRCGASSGQTSGCGSGQSTRYDEQGSGSRNSSTQSRGRSTSRESSTSQRFGSGSGGSSGFSQGRSGQGRSSRGGQQGSFSGQTEGSQQHGSCCGQSSGYGQNEYGSGHSASSGQQGSHYSQSSSYGTHNSGGSPSSSQRGHGSRSGRSSGLGQYGSPSGQTSSSTRQGSGQGQASGSGRYGASSGQTSGCGSGQSTRYGEQGSGSRNSSTQSRGRSTSRESSTSQRYGSGSGESSGFSQGGSGQGRSSRGGQQGSFSGQTSGRSQHQSGSRHGSGSGQFPISGQQGSHHGHSSSSGTHNSGSSQSSSTQWSHGSGSEQSSGLGHYGSTSGQTASSTRQGSGQGQASGSGRCGASSGQTSGCGSGQSTRYGEQGSGSRNSSTQSRGRSTSRESSTSQRFGSGSGGSSGFSQGRSGQGRSSRGGQQGSFSGQTEGSQQHGSCCGQSSGYGQNEYGSGHSASSGQQGSHYSQSSSYGTHNSGGSPSSSQRGHGSRSGRSSGLGQYGSPSGQTSSSTRQGSGQGQASGSGRYGASSGQTSGCGSGQSTRYGEQGSGSRNSSTQSRGRSTSRESSTSQRYGSGSGESSGFSQGGSGQGRSSRGGQQGSFSGQTSGRSQHQSGSRHGSGSGQFPISGQQGSHHGHSSSSGTHNSGSSQSSSTQWSHGSGSEQSSGLGHYGSTSGQTASSTRQGSGQGQASGSGRCGASSGQTSGCGSGQSTRYGEQGSGSRNSSTQSRGRSTSRESSTSQRYGSGSGGSSGFSQGGSGQGRSSRGGQQGSFSGQTEGSQQHGSCCGQSSGYGQNEYGSGHSASSGQQGSHYSQSSSYGTHNSGGSPSSSQRGHGSRSGRSSGLGQYGSPSGQTSSSTRQGSGQGQASGSGRYGASSGQTSGCGSGQSTRYGEQGSGSRNSSTQSRGRSTSRESSTSQRYGSGSGESSGFSQGGSGQGRSSRGGQQGSFSGQTSGRSQHQSGSRHGSGSGQFPISGQQGSHHGHSSSSGTHNSGSSQSSSTQWSHGSGSEQSSGLGHYGSTSGQTASSTRQGSGQGQASGSGRCGASSGQTSGCGSGQSTRYGEQGSGSRNSSTQSRGRSTSRESSTSQRYGSGSGGSSGFSQGGSGQGRSSRGGQQGSFSGQTSGRSQHQSGSRHGSGSGQFPISGQQGSHHGHSSSSGTHNSGSSQSSSTQWSHGSGSEQSSGLGHYGSTSGQTASSTRQGSGQGQASGSGRCGASSGQTSGCGSGQSTRYGEQGSGSRNSSTQSRGRSTSRESSTSQRFGSGSGGSSGFSQGRSGQGRSSRGGQQGSFSGQTEGSQQHGSCCGQSSGYGQNEYGSGHSASSGQQGSHYSQSSSYGTHNSGGSPSSSQRGHGSRSGRSSGLGQYGSPSGQTSSSTRQGSGQGQASGSGRYGASSGQTSGCGSGQSTRYGEQGSGSRNSSTQSRGRSTSRESSTSQRYGSGSGESSGFSQGGSGQGRSSRGGQQGSFSGQTSGRSQHQSGSRHGSGSGQFPISGQQGSHHGHSSSSGTHNSGSSQSSSTQWSHGSGSEQSSGLGHYGSTSGQTASSTRQGSGQGQASGSGRCGASSGQTSGCGSGQSTRYGEQGSGSRNSSTQSRGRSTSRESSTSQRFGSGSGGSSGFSQGRSGQGRSSRGGQQGSFSGQTEGSQQHGSCCGQSSGYGQNEYGSGHSASSGQQGSHYSQSSSYGTHNSGGSPSSSQRGHGSRSGRSSGLGQYGSPSGQTSSSTRQGSGQGQASGSGRYGASSGQTSGCGSGQSTRYGEQGSGSRNSSTQSRGRSTSRESSTSQRYGSGSGESSGFSQGGSGQGRSSRGGQQGSFSGQTSGRSQHQSGSRHGSGSGQFPISGQQGSHHGHSSSSGTHNSGSSQSSSTQWSHGSGSEQSSGLGHYGSTSGQTASSTRQGSGQGQASGSGRCGASSGQTSGCGSGQSTRYGEQGSGSRNSSTQSRGRSTSRESSCSQHDVSGSGESSSFSQHRSCQSQASHNGQCGPFSGQSSGHIQHGPCFGQTEGSFQSSNCGQQGTTSYQSSGFDQQRSGLHQSFPCSNHESTSQEYSSFGSCVSGSGECSGFGNQVSRPSQSTYEHHESNRNQSSGYRQYNTASGQSYCGGQCGSNSNQSSSYREQGLGSNQSSQYGQYRCPSSHYSSQSQHGVGCSHGFNTGQYGSGSYPSSNSRQNCPGSGLCPTSEQYGSGSCQSFSPGSCGSGYGQYSNFEQPQSNRRCGNQWESGCSSSNCNENQSIRVHRQVETSSGCGFGQFSSQEQIRSDTTGKLSLCNVDNRQGNCKYQIIKGSNFGMRNTVSGPHSFNSSTPLYEYVQEQRR

SEQ ID NO: 692 - protein, 370 aa, mus musculus
MRNNMTASMFDLSMKDKTRSPFAKLKDKMKGRKSDGVFSDTSSAIVPSTHMPDANPEFSSGEMQMKSKPKKPFLLGPQRLSSAHSMSDLTGSHLSSEKLKSSTVGPTHLLSRQIDSFGVVPESGSLKSPHRRTLSFDTSKLNQPGSIVDEGEHSFGRQSDPFTNVTASLPQKFATLPRKKNPFEESSEPWDSSMNLFSKPIEVRKESKREKREKVSLFERVTGKRDSRRPDKLNNGGSDSPCDLKSPSAFSENRQDYFEYESTNPFTAKFRASTIMPSSSFHVNPTSSEDLRKIPDNNPFDATAGYRSLTYEEVLQELVKHKELLRRKDTHIRELEDYIDNLLVRVMEETPSILRVPYEPSRKAGKFTNS

SEQ ID NO: 693 - protein, 293 aa, mus musculus
MKHYEVEIRDAKTREKLCFLDKVEPQATISEIKTLFTKTQGKSLKDEDVLQKLPVGTTATLYFRDLGAQISWVTVFLTEYAGPLFIYLLFYFRVPFIYGRKYDFTSSRHTVVHLACMCHSFHYIKRLLETLFVHRFSHGTMPLRNIFKNCTYYWGFAAWMAYYINHPLYTPPTYGVQQVKLALAVFVICQLGNFSIHMALRDLRPAGSKTRKIPYPTKNPFTWLFLLVSCPNYTYEVGSWIGFAILTQCVPVALFSLVGFTQMTIWAKGKHRSYLKEFRDYPPLRMPIIPFLL

SEQ ID NO: 694 - protein, 105 aa, mus musculus
MSDVEKGKKIFVQKYAQCHTVEKGGKHKTGPNLHGLFGRKTGQAAGFSYTDANKNKGITWGEDTLMEYLENPKKYIPGTKMIFAGIKKKGERADLIAYLKKATNE

SEQ ID NO: 695 - protein, 1716 aa, mus musculus
MSSEEDRSAEQQQPPPAPPEEPGAPAPSPAAADKRPRGRPRKDGASPFQRARKKPRSRGKSTVEDEDSMDGLETTETENIVETEIKEQSVEEDAETEVDSSKQPVSALQRSVSEESANSLVSVGVEAKISEQLCAFCYCGEKSSLGQGDLKQFRVTPGLTLPWKDQPSNKDIDDNSSGTCEKIQNYAPRKQRGQRKERPPQQSAVSCVSVSTQTACEDQAGKLWDELSLVGLPDAIDVQALFDSTGTCWAHHRCVEWSLGICQMEEPLLVNVDKAVVSGSTERCAFCKHLGATIKCCEEKCTQMYHYPCAAGAGTFQDFSHFFLLCPEHIDQAPERSKEDANCAVCDSPGDLLDQFFCTTCGQHYHGMCLDIAVTPLKRAGWQCPECKVCQNCKQSGEDSKMLVCDTCDKGYHTFCLQPVMKSVPTNGWKCKNCRICIECGTRSSTQWHHNCLICDTCYQQQDNLCPFCGKCYHPELQKDMLHCNMCKRWVHLECDKPTDQELDSQLKEDYICMYCKHLGAEIDPLHPGNEVEMPELPTDYASGMEIEGTEDEVVFLEQTVNKDVSDHQCRPGIVPDAVQVYTEEPQKSNPLESPDTVGLITSESSDNKMNPDLANEIAHEVDTEKTEMLSKGRHVCEEDQNEDRMEVTENIEVLPHQTIVPQEDLLLSEDSEVASKELSPPKSAPETAAPEALLSPHSERSLSCKEPLLTERVQEEMEQKENSEFSTGCVDFEMTLAVDSCDKDSSCQGDKYVELPAEEESTFSSATDLNKADVSSSSTLCSDLPSCDMLHGYPPAFNSAAGSIMPTTYISVTPKIGMGKPAITKRKFSPGRPRSKQGRGSGFPGKRRPRGAGLSGRGGRGRSKLKSGIGAVVLPGVSAADISSNKDEEENSMHNTVVLFSSSDKFTLQQDMCVVCGSFGQGAEGRLLACSQCGQCYHPYCVSIKITKVVLSKGWRCLECTVCEACGKATDPGRLLLCDDCDISYHTYCLDPPLQTVPKGGWKCKWCVWCRHCGATSAGLRCEWQNNYTQCAPCASLSSCPVCCRNYREEDLILQCRQCDRWMHAVCQNLNTEEEVENVADIGFDCSMCRPYMPVSNVPSSDCCDSSLVAQIVTKVKELDPPKTYTQDGVCLTESGMSQLQSLTVTAPRRKRTKPKLKLKIINQNSVAVLQTPPDIQSEHSRDGEMDDSREGELMDCDGKSESSPEREAGDDETKGIEGTDAIKKRKRKPYRPGIGGFMVRQRSRTGQGKAKRSVVRKDSSGSISEQLPSRDDGWREQLPDTLVDEPVSVAENTDKIKKRYRKRKNKLEETFPAYLQEAFFGKDLLDTSRQNKLSVDNLSEDAAQLSFKTGFLDPSSDPLLSSSSTSAKPGTQDIGPTTADASSLPQPGVSQSSRPLTEEQLDGILSPELDKMVTDGAILGKLYKIPELGGKDVEDLFTAVLSPATTQPAPLPQPPPPPQLLPMHNQDVFSRMPLMNGLIGPSPHLPHNSLPPGSGLGTFPAIAQSPYTDVRDKSPAFNAIASDPNSSWAPTTPSMEGENDTLSNAQRSTLKWEKEEALGEMATVAPVLYTNINFPNLKEEFPDWTTRVKQIAKLWRKASSQERAPYVQKARDNRAALRINKVQMSNDSMKRQQQQDSIDPSSRIDSDLFKDPLKQRESEHEQEWKFRQQMRQKSKQQAKIEATQKLEQVKNEQQQQQQQQQQQQQQQLASQHLL

SEQ ID NO: 696 - protein, 166 aa, mus musculus
MLQLGLRVLGCKASSVLRASTCLAGRAGRKEAGWECGGARSFSSSAVTMAPIKVGDAIPSVEVFEGEPGKKVNLAELFKGKKGVLFGVPGAFTPGCSKVRLLADPTGAFGKATDLLLDDSLVSLFGNRRLKRFSMVIDNGIVKALNVEPDGTGLTCSLAPNILSQL

SEQ ID NO: 697 - protein, 321 aa, mus musculus
MASSQGKNELKFADWMATLPESIHSIPLTNLAIPGSHDSFSFYIDEASPVGPEQPETVQNFVSVFGTVAKKLMRKWLATQTMSFTGQLGAGIRYFDLRISTKPRDPDNELYFAHGLFSAKVNEGLEEINAFLTDHHKEVVFLDFNHFYGMQKYHHEKLVQMLKDIYGNKMCPAIFAQEVSLKYLWEKDYQVLVFYHSPVALEVPFLWPGQMMPAPWANTTDPEKLIQFLQASITERRKKGSFFISQVVLTPKASTVVKGVASGLRETITERALPAMMQWIRTQKPGESGINIVTADFVELGDFISTVIKLNYVFNEGEANT

SEQ ID NO: 698 - protein, 1940 aa, mus musculus
MSEEPKEKPAKPAHRKRKGKKSDANASYLRAARAGHLEKALDYIKNGVDVNICNQNGLNALHLASKEGHVEVVSELLQREANVDAATKKGNTALHIASLAGQAEVVKVLVTNGANVNAQSQNGFTPLYMAAQENHLEVVRFLLDNGASQSLATEDGFTPLAVALQQGHDQVVSLLLENDTKGKVRLPALHIAARKDDTKAAALLLQNDTNADVESKSGFTPLHIAAHYGNINVATLLLNRAAAVDFTARNDITPLHVASKRGNANMVKLLLDRGAKIDAKTRDGLTPLHCGARSGHEQVVEMLLDRSAPILSKTKNGLSPLHMATQGDHLNCVQLLLQHNVPVDDVTNDYLTALHVAAHCGHYKVAKVLLDKKASPNAKALNGFTPLHIACKKNRIRVMELLLKHGASIQAVTESGLTPIHVAAFMGHVNIVSQLMHHGASPNTTNVRGETALHMAARSGQAEVVRYLVQDGAQVEAKAKDDQTPLHISARLGKADIVQQLLQQGASPNAATTSGYTPLHLAAREGHEDVAAFLLDHGASLSITTKKGFTPLHVAAKYGKLEVASLLLQKSASPDAAGKSGLTPLHVAAHYDNQKVALLLLDQGASPHAAAKNGYTPLHIAAKKNQMDIATSLLEYGADANAVTRQGIASVHLAAQEGHVDMVSLLLSRNANVNLSNKSGLTPLHLAAQEDRVNVAEVLVNQGAHVDAQTKMGYTPLHVGCHYGNIKIVNFLLQHSAKVNAKTKNGYTALHQAAQQGHTHIINVLLQNNASPNELTVNGNTALAIARRLGYISVVDTLKVVTEEIMTTTTITEKHKMNVPETMNEVLDMSDDEGDKCTWFKIPKVQEVLVKSEDAITGDTDKYLGPQDLKELGDDSLPAEGYVGFSLGARSASLRSFSSDRSYTLNRSSYARDSMMIEELLVPSKEQHLTFTREFDSDSLRHYSWAADTLDNVNLVSSPVHSGFLVSFMVDARGGSMRGSRHHGMRIIIPPRKCTAPTRITCRLVKRHKLANPPPMVEGEGLASRLVEMGPAGAQFLGPVIVEIPHFGSMRGKERELIVLRSENGETWKEHQFDSKNEDLAELLNGMDEELDSPEELGTKRICRIITKDFPQYFAVVSRIKQESNQIGPEGGILSSTTVPLVQASFPEGALTKRIRVGLQAQPVPEETVKKILGNKATFSPIVTVEPRRRKFHKPITMTIPVPPPSGEGVSNGYKGDATPNLRLLCSITGGTSPAQWEDITGTTPLTFIKDCVSFTTNVSARFWLADCHQVLETVGLASQLYRELICVPYMAKFVVFAKTNDPVESSLRCFCMTDDRVDKTLEQQENFEEVARSKDIEVLEGKPIYVDCYGNLAPLTKGGQQLVFNFYSFKENRLPFSIKIRDTSQEPCGRLSFLKEPKTTKGLPQTAVCNLNITLPAHKKAEKADRRQSFASLALRKRYSYLTEPSMSPQSPCERTDIRMAIVADHLGLSWTELARELNFSVDEINQIRVENPNSLISQSFMLLKKWVTRDGKNATTDALTSVLTKINRIDIVTLLEGPIFDYGNISGTRSFADENNVFHDPVDGHPSFQVELETPMGLYCTPPNPFQQDDHFSDISSIESPFRTPSRLSDGLVPSQGNIEHPTGGPPVVTAEDTSLEDSKMDDSVTVTDPADPLDVDESQLKDLCQSECAQCWASVPGIPNDGRQAEPLRPQTRKVGMSSEQQEKGKSGPDEEVTEDKVKSLFEDIQLEEVEAEEMTEDQGQAMLNRVQRAELAMSSLAGWQNETPSGSLESPAQARRLTGGLLDRLDDSSDQARDSITSYLTGEPGKIEANGNHTAEVIPEAKAKPYFPESQNDIGKQSIKENLKPKTHGCGRTEEPVSPLTAYQKSLEETSKLVIEDAPKPCVPVGMKKMTRTTADGKARLNLQEEEGSTRSEPKQGEGYKVKTKKEIRNVEKKTH

SEQ ID NO: 699 - protein, 552 aa, mus musculus
MADGVDHIDIYADVGEEFNQEAEYGGHDQIDLYDDVISPSANNGDAPEDRDYMDTLPPTVGDDVGKGAAPNVVYTYTGKRIALYIGNLTWWTTDEDLTEAVHSLGVNDILEIKFFENRANGQSKGFALVGVGSEASSKKLMDLLPKRELHGQSPVVTPCNKQFLSQFEMQSRKTTQSGQMSGEGKAGPPGGGSRAAFPQGGRGRGRFPGAVPGGDRFPGPAGPGGPPPPFPAGQTPPRPPLGPPGPPGPPGPPPPGQVLPPPLAGPPNRGDRPPPPVLFPGQPFGQPPLGPLPPGPPPPVPGYGPPPGPPPPQQGPPPPPGPFPPRPPGPLGPPLTLAPPPHLPGPPPGAPPPAPHVNPAFFPPPTNSGMPTSDSRGPPPTDPYGRPPPYDRGDYGPPGREMDTARTPLSEAEFEEIMNRNRAISSSAISRAVSDASAGDYGSAIETLVTAISLIKQSKVSADDRCKVLISSLQDCLHGIESKSYGSGSRRRERSRERDHSRSREKSRRHKSRSRDRHDDYYRERSRERERHRDRDRDRDRERDREREYRHR

SEQ ID NO: 700 - protein, 200 aa, mus musculus
MREHPALRSLRLLTLEQPQGDSMMTCEQAQLLANLARLIKAKKALDLGTFTGYSALALALALPEAGRVVTCEVDAEPPKLGRPMWKQAEVEQKIDLRLQPALQTLDELLAAGEAGTFDIAVVDADKENCTAYYERCLQLLRPGGVLAVLRVLWRGEVLQPQPRNKTVECVRNLNERILRDARVYISLLPLDDGLSLAFKI

SEQ ID NO: 701 - protein, 338 aa, mus musculus
RANYFFHSAKWSPGALGRARLLPKVLSIRGAQEEEPTDPQLMRLDNMLLAEGVAGPEKGGGSAAAAAAAAASGGAGSDNSVEHSDYRAKLSQIRQIYHTELEKYEQACNEFTTHVMNLLREQSRTRPISPKEIERMVSIIHRKFSSIQMQLKQSTCEAVMILRSRFLDARRKRRNFNKQATEILNEYFYSHLSNPYPSEEAKEELAKKCGITVSQVSNWFGNKRIRYKKNIGKFQEEANIYAAKTAVTATNVSAHGSQANSPSTPNSAGSSSSFNMSNSGDLFMSVQSLNGDSYQGAQVGANVQSQVDTLRHVISQTGGYSDGLAASQMYSPQGISVS

SEQ ID NO: 702 - protein, 213 aa, mus musculus
MWGRQDIQESEDRNGPLNRQALFLLGVSTGSIKVYLCGCGSLVSLHSVLPWSLFLQVGDAIPSVEVFEGEPGKKVNLAELFKGKKGVLFGVPGAFTPGCSKTHLPGFVEQAGALKAKGAQVVACLSVNDVFVIEEWGRAHQAEGKVRLLADPTGAFGKATDLLLDDSLVSLFGNRRLKRFSMVIDNGIVKALNVEPDGTGLTCSLAPNILSQL

SEQ ID NO: 703 - protein, 256 aa, mus musculus
MSQVLDAMFEKLVKEGEHVIDQGDDGDNFYVIDRGTFDIYVKCDGVGRCVGNYDNRGSFGELALMYNTPRAATITATSPGALWGLDRVTFRRIIVKNNAKKRKMYESFIESLPFLKSLEVSERLKVVDVIGTKVYNDGEQIIAQGDLADSFFIVESGEVKITMKRKGKSEVEENGAVEIARCFRGQYFGELALVTNKPRAASAHAIGTVKCLAMDVQAFERLLGPCMEIMKRNIATYEEQLVALFGTNMDIVEPTA

SEQ ID NO: 704 - protein, 273 aa, mus musculus
MSELDQLRQEAEQLKNQIRDARKACADATLSQITNNIDPVGRIQMRTRRTLRGHLAKIYAMHWGTDSRLLVSASQDGKLIIWDSYTTNKVHAIPLRSSWVMTCAYAPSGNYVACGGLDNICSIYNLKTREGNVRVSRELAGHTGYLSCCRFLDDNQIVTSSGDTTCALWDIETGQQTTTFTGHTGDVMSLSLAPDTRLFVSGACDASAKLWDVREGMCRQTFTGHESDINAICFFPNGNAFATGSDDATCRLFDLRADQELMTYSHDNIICGI

SEQ ID NO: 705 - protein, 618 aa, mus musculus
METAPTRAPPPPPPPLLLLVLYCSLVPAAASPLLLFANRRDVRLVDAGGVKLESTIVASGLEDAAAVDFQFSKGAVYWTDVSEEAIKQTYLNQTGAAAQNIVISGLVSPDGLACDWVGKKLYWTDSETNRIEVANLNGTSRKVLFWQDLDQPRAIALDPAHGYMYWTDWGEAPRIERAGMDGSTRKIIVDSDIYWPNGLTIDLEEQKLYWADAKLSFIHRANLDGSFRQKVVEGSLTHPFALTLSGDTLYWTDWQTRSIHACNKWTGEQRKEILSALYSPMDIQVLSQERQPPFHTPCEEDNGGCSHLCLLSPREPFYSCACPTGVQLQDNGKTCKTGAEEVLLLARRTDLRRISLDTPDFTDIVLQVGDIRHAIAIDYDPLEGYVYWTDDEVRAIRRAYLDGSGAQTLVNTEINDPDGIAVDWVARNLYWTDTGTDRIEVTRLNGTSRKILVSEDLDEPRAIVLHPVMGLMYWTDWGENPKIECANLDGRDRHVLVNTSLGWPNGLALDLQEGKLYWGDAKTDKIEVINIDGTKRKTLLEDKLPHIFGFTLLGDFIYWTDWQRRSIERVHKVKASRDVIIDQLPDLMGLKAVNVAKVVGESWSSEPWLHLASWPQER

SEQ ID NO: 706 - protein, 194 aa, mus musculus
MFSSSAKIGKPNGEKPDEFESGISQALLELEMNSDLKAQLRELNITAAKEIEVGGGRKAIIIFVPVPQLKSFQKIQVRLVRELEKKFSGKHVVFIAQRRILPKPTRKSRTKNKQKRPRSRTLTAVHDAILEDLVFPSEIVGKRIRVKLDGSRLIKVHLDKAQQNNVEHKVETFSGVYKKLTGKDVNFEFPEFQL

SEQ ID NO: 707 - protein, 168 aa, mus musculus
MKGAMEPEPEVLLQEARENVEAAQSYRRELGQRLQGLREAQRQIKESASQTRDVLKQHFSDLKGTLGKLLDERLVTLLQEVDTIEQETIKPLDDCQKLIEHGVNTADDLVREGEIAILGGIEEESDKLWNFTKKASHIQLDRWMMTSQPKITGFSSANVLQIILKTCM

SEQ ID NO: 708 - protein, 165 aa, mus musculus
MLMPKKNRIAIYELLFKEGVMVAKKDVHMPKHPELADKNVPNLHVMKAMQSLKSRGYVKEQFAWRHFYWYLTNEGIQCPRDYLHLPPEIVPATLRRSRPETGRPRPKGPEGERPARFTRGEADRDTYRRSAVPPGADKKTEAGAGSATEFQFRGGFGRGRGQPPQ

SEQ ID NO: 709 - protein, 210 aa, mus musculus
  misc_feature (1)..(1): Xaa can be any naturally occurring amino acid
XTAEAASFSDMMDVVYVAQMIQKFLGYVDQIKELVEVMVDMASNLMLVDEHLLWLAQREDKACSGIVGALERIGGAALSPHAQHISVNSRNVALEAYLIKPHSYVGLTCTAFQRREVGVSGAQPSSVGQDAPVEPEPLADQQLRFRCTTGRPNISLSSFHIKPRQQHFPSWSSWAWQEAWCGHPSHICRNQWLWCGKLDGARGCVTEALG

SEQ ID NO: 710 - protein, 190 aa, mus musculus
  misc_feature (1)..(1): Xaa can be any naturally occurring amino acid
XEVYHHLKGVIKAKYGKDATNVGDEGGFAPNILENNEALELLKTAIQAAGYPDKVVIGMDVAASEFYRNVVSIEDPFDQDDWATWTSFLSGVDIQIVGDDLTVTNPKRIAQAVEKKACNCLLLKVNQIGSVTESIQACKLAQSNGWGVMVSHRSGETEDTFIADLVVGLCTGQIKTGAPCRSERLAKYNQ

SEQ ID NO: 711 - protein, 5033 aa, mus musculus
MGDGGGEGEDEVQFLRTDDEVVLQCSATVLKEQLKLCLAAEGFGNRLCFLEPTSNAQNVPPDLAICCFILEQSLSVRALQEMLANTVEAGVESSQGGGHRTLLYGHAILLRHAHSRMYLSCLTTSRSMTDKLAFDVGLQEDATGEACWWTMHPASKQRSEGEKVRVGDDLILVSVSSERYLHLSTASGELQVDASFMQTLWNMNPICSGCEEGFVTGGHVLRLFHGHMDECLTISPSDSDDQRRLVYYEGGPVCTHARSLWRLEPLRISWSGSHLRWGQPLRIRHVTTGRYLGLTEDQGLVVVDASKAHTKATSFCFRISKEKLDVAPKRDVEGMGPPEIKYGESLCFVQHVASGLWLTYAAPDPKALRLGVLKKKAMLHQEGHMDDALSLTRCQQEESQAARMIYSTAGLYNQFIKGLDSFSGKPRGSGPPAGSALPIEGVILSLQDLIGYFEPPSEELQHEEKQTKLRSLRNRQSLFQEEGMLSLVLNCIDRLNVYTTAAHFAEFAGEEAAESWKEIVNLLYELLASLIRGNRTNCALFSTNLDWLVSKLDRLEASSGILEVLYCVLIESPEVLNIIQENHIKSIISLLDKHGRNHKVLDVLCSLCVCNGVAVRSNQDLITENLLPGRELLLQTNLINYVTSIRPNIFVGRAEGSTQYGKWYFEVMVDEVAPFLTAQATHLRVGWALSEGYSPYPGGGEGWGGNGVGDDLYSYGFDGLHLWTGHVARPVTSPGQHLLAPEDVVSCCLDLSVPSISFRINGCPVQGVFESFNLDGLFFPVVSFSAGIKVRFLLGGRHGEFKFLPPPGYAPCHEAVLPRERLHLQPIKEYRREGPRGPHLVGPSRCLSHLDFVPCPVDTIQIVLPPHLERIREKLAENIHELWALTRIEQGWTYGPVRDDNKRLHPCLVNFHSLPEPERNYNLQMSGETLKTLLALGCHVGMADEKAEDNLKKTKLPKTYMMSNGYKPAPLDLSHVRLTPAQTTLVDRLAENGHNVWARDRVAQGWSYSAVQDIPARRNPRLVPYRLLDEATKRSNRDSLCQAVRTLLGYGYNIEPPDQEPSQVDSQSRGDRARIFRAEKSYAVQSGRWYFEFEAVTTGEMRVGWARPELRPDVELGADDLAYVFNGHRGQRWHLGSEPFGRPWQSGDVVGCMIDLTENTIIFTLNGEVLMSDSGSETAFRDIEIGDGFLPVCSLGPGQVGHLNLGQDVSSLRFFAICGLQEGFEPFAINMQRPVTTWFSKSLPQFEPVPLEHPHYEVARMDGTVDTPPCLRLTHRTWGSQNSLVEMLFLRLSLPVQFHQHFRCTAGATPLASPGLQPPAEDEARAAEPDTDYENLRRSAGGWGEAEGGKDGTAKEGTPGGTAQAGVEAQPARAENEKDATTEKNKKRGFLFKAKKVAMMTQPPSTPALPRLPRDVVPADNRDDPEIILNTTTYYYSVRVFAGQEPSCVWVGWVTPDYHQHDMSFDLSKVRAVTVTMGDEQGNVHSSLKCSNCYMVWGGDFVSPGQQGRISHTDLVIGCLVDLATGLMTFTANGKESNTFFQVEPNTKLFPAVFVLPTHQNVVQFELGKQKNIMPLSAAMFLSERKNPAPQCPPRLEVQMLMPVSWSRMPNHFLQVDTRRAGERLGWAVQCQEPLMMMALHIPEENRCMDILELSERLDLQRFHSHTLSLYRSVCALGNNRVAHALCSHVDQAQLLHALEDARLPGPLRAGYYDLLISIHLESACRSRRSMLSEYIVPLTPETRAITLFPPGRSAEDGPRRHGLPGVGVTTSLRPPHHFSPPCFVVALPAAGATEAPARLSPAIPLEALRDKALRMLGEAVRDGGQHARDPVGGSVEFQFVPVLKLVSTLLVMGVFSDEDVKQILKMIEPEVFREEEEVEEEGEEEEEDEEEKEEDEEEEAHEKEDEEKEEAEDAAEEEKEELEEGLLQMKLPESVKLQMCHLLEYFCDQELQHRVESLAAFAECYVDKMQGNQRGRYGLLMKAFTMSAAETARRTREFRSPPQEQINMLLHFKNGADEEECPLPEEIRQELVNFHQDLLAHCGIQLEGEEEEPEEESTLGSRLMSLLEKVKLVKKTEEKPEEEPAPEEHKPQSLQELVSHTVVRWAQEDFVQSPELVRAMFSLLHRQYDGLGELLRALPRAYTISVSSVEDTMSLLECLGQIRSLLIVQMGPQEENLMIQSIGNIMNNKVFYQHPNLMRALGMHETVMEVMVNVLGGGESKEIRFPKMVTSCCRFLCYFCRISRQNQRSMFDHLSYLLENSGIGLGMQGSTPLDVAAASVIDNNELALALQEQDLEKVVSYLAGCGLQSCPMLLAKGYPDIGWNPCGGERYLDFLRFAVFVNGESVEENANVVVRLLIRKPECFGPALRGEGGSGLLAAIEEAIRISEDPARDGPGVRRDRRREHFGEEPPEENRVHLGHAIMSFYAALIDLLGRCAPETHLIQAGKGEALRIRAILRSLVPLDDLVGIISLPLQIPTLGKDGALVQPKMSASFVPDHKASMVLFLDRVYGIENQDFLLHVLDVGFLPDMRAAASLDTATFSTTEMALALNRYLCLAVLPLITKCAPLFAGTEHRAIMVDSMLHTVYRLSRGRSLTKAQRDVIEDCLMALCRYIRPSMLQHLLRRLVFDVPILNEFAKMPLKLLTNHYERCWKYYCLPTGWANFGVTSEEELHLTRKLFWGIFDSLAHKKYDQELYRIAMPCLCAIAGALPPDYVDASYSSKTEKKATVDAEGNFDPRPVETLNVIIPEKLDSFINKFAEYTHEKWAFDKIQNNWSYGENIDEELKTHPMLRPYKTFSEKDKEIYRWPIKESLKAMIAWEWTVEKAREGEEEKTEKKKTRKISQTAQTYDPREGYNPQPPDLSVVTLSRELQAMAEQLAENYHNTWGRKKKQELEAKGGGSHPLLVPYDTLTAKEKARDREKAQELLKFLQMNGYAVTRGLKDMELDTSSIEKRFAFGFLQQLLRWMDISQEFIAHLEAVVSSGRVEKSPHEQEIKFFAKILLPLINQYFTNHCLYFLSTPAKVLGSGGHASNKEKEMITSLFCKLAALVRHRVSLFGTDAPAVVNCLHILARSLDARTVMKSGPEIVKAGLRSFFESASEDIEKMVENLRLGKVSQARTQVKGVGQNLTYTTVALLPVLTTLFQHIAQHQFGDDVILDDVQVSCYRTLCSIYSLGTTRNPYVEKLRPALGECLARLAAAMPVAFLEPELNEYNACSVYTTKSPRERAILGLPNSVEEMCPDIPVLERLMAEIGGLAESGARYTEMPHVIEITLPMLCSYLPRWWERGPEAPPPALPAGAPPPCTAVTSDHLNSLLGNILRIIVNNLGIDEASWMKRLAVFAQPIVSRARPELLRSHFIPTIGRLRKRAGKVVAEEEQLRLEAKAEAEEGELLVRDEFSVLCRDLYALYPLLIRYVDNNRAHWLTEPNPNAEELFRMVGEIFIYWSKSHNFKREEQNFVVQNEINNMSFLTADNKSKMAKVVQSGGSDQERTKKKRRGDRYSVQTSLIVATLKKMLPIGLNMCAPTDQDLIVLAKARYALKDTDEEVREFLQNNLNLQGKVEGSPSLRWQMALYRGVPGREEDADDPEKIVRRVQEVSAVLYHLDQTEHPYKSKKAVWHKLLSKQRRRAVVACFRMTPLYNLPTHRACNMFLESYKASWILTEDHSFEDRMIDDLSKAGEQEEEEEEVEEKKPDPLHQLVLHFSRTALTEKSKLDEDYLYMAYADIMAKSCHLEEGGENGEEGGEEEEVEVSFEEKEMEKQRLLYQQSRLHNRGAAEMVLQMISACKGETGAMVSSTLKLGISILNGGNAEVQQKMLDYLKDKKEVGFFQSIQALMQTCSVLDLNAFERQNKAEGLGMVNEDGTVINRQNGEKVMADDEFTQDLFRFLQLLCEGHNNDFQNYLRTQTGNTTTINIIICTVDYLLRLQESISDFYWYYSGKDVIEEQGKRNFSKAMSVAKQVFNSLTEYIQGPCTGNQQSLAHSRLWDAVVGFLHVFAHMMMKLAQDSSQIELLKELLDLQKDMVVMLLSLLEGNVVNGMIARQMVDMLVESSSNVEMILKFFDMFLKLKDIVGSEAFQDYVTDPRGLISKKDFQKAMDSQKQFTGPEIQFLLSCSEADENEMINCEEFANRFQEPARDIGFNVAVLLTNLSEHVPHDPRLRNFLELAESILEYFRPYLGRIEIMGASRRIERIYFEISETNRAQWEMPQVKESKRQFIFDVVNEGGESEKMEMFVSFCEDTIFEMQIAAQISEPEGEPEEDEDEGAEEAEEGAAGSDGSGSAAAAGVWVWLAATAGRTLRGLSYRSLRRRVRRLRRLTAREAATAVAALLWALVTRAGGAGAGAAAGALRLLWGSLFGGGLVDSAKKVTVTELLAGMPDPTGDEVHGQQPSGAGSDAEGEGEGEGEGDAADGAGDEEAAADQAGTGGADGAVAVADGSPFRPEGAGGLGDMGDTTPVEPPTPEGSPILKRKLGVDGEEEEPPPEPEPEPEPEPEKADTENGEKEVPEPPPEPPKKTPPPPPPKKEEAGGAGLEEFWGELEVQRVKFLNYLSRNFYTLRFLALFLAFAINFILLFYKVSDSPPGEDDIEGSGAGDMSGAGSGDGSGWGSRAGEEVEGDEDENMVYYFLEESTGYMEPALRCLSLLHTLVAFLCIIGYNCLKVPLVIFKREKELARKLEFDGLYITEQPEDDDVKGQWDRLVLNTPSFPSNYWDKFVKRKVLDKHGDIFGRERIAELLGMDLASLEITAHNERKPDPPPGLLTWIMSIDVKYQIWKFGVIFTDNSFLYLGWYMVMSLLGHYNNFFFAAHLLDIAMGVKTLRTILSSVTHNGKQLVMTVGLLAVVVYLYTVVAFNFFRKFYNKSEDEDEPDMKCDDMMTCYLFHMYVGVRAGGGIGDEIEDPAGDEYELYRVVFDITFFFFVIVILLAIIQGLIIDAFGELRDQQEQVKEDMETKCFICGIGSDYFDTTPHGFETHTLEEHNLANYMFFLMYLINKDETEHTGQESYVWKMYQERCWDFFPAGDCFRKQYEDQLS

SEQ ID NO: 712 - protein, 2222 aa, mus musculus
MTERASDSRRLLPGEGASSRGARAAGRMNRAKPTTVRRPSAAAKPSGHPPPGDFIALGSKGQASESKTTSTLLKPAPSGLPSERKRDASASLSGTSALTGLTKRPKLSSTPPLSALGRLAEAAVAEKRAISPSIKEPSVVPIEVLPTVLLDEIEAAELEGNDDRIEGVLCGAVKQLKVTRAKPDSTLYLSLMYLAKIKPNIFATEGVIEALCSLLRRDASVNFKAKGNSLVSVLACNLLMAAYEEDENWPEIFVKVYIEDSLGERIWVDSPHCRTFVDNIQTAFNTKMPPKSVLLQGEGARSGGELGAGSSPHPSLTEEEDSQTELLIAEEKLSPEQEGQLMPRPRYDELTESVEEYVLDMLRDQLNRRQPIDNVSRNLLRLLTATCGYKEVRLLAVQRLEMWLQNPKLTRPAQDLLMSVCMNCNSHGSEDMDVISHLIKIRLKPKVLLNHYMLCIRELLNAHKDNLGTTIKFVIFNELSNARNPNNMQILYTVLQHSSELAPKFLAMVFQDLLTNKDDYLRASRALLREIIKQTKHEINFQAFCLGLMQERKEPQYLEMEFKERFVVHITDVLAVSMMLGITAQVKEAGVAWDKGEKRNLEVLRTFQNQIAAIQRDAVWWLHTVVPSVSKLAPKDYVHCLHKVLFTEQPETYYKWDNWPPESDRNFFLRLCSEVPILEDTLMRVLVIGLSRELPLGPADAMELADHLVKRAAAVQADDVEVLKVERIQLIDAVLNLCTYHHPENIQLPPGYQPPNLAISTLYWKAWPLLLVVAAFNPENIGLAAWEEYPTLKMLMEMVMTNNYSYPPCTLTDEETRTEMINRELQISQREKQEILAFEGHLAAASTKQTITESSSLLLSQLTSLDPQGPPRRPPPHILDQVKALNQSLRLGHLLCRSRNPDFLLHIIQRQASSQSMPWLADLVQSSEGSLDVLPVQCLCEFLLHDAADSTASGEEDDEGESREQKAKKRQRQQKQRQLLGRLQDLLLGPKADEQTTCEVLDYFLRRLGSSQVASRVLAMKGLSLVLSEGGLRDKEEKEPPMEEDIGETDALQGYQWLLRDLPRLPLFDSVRTTTALALQQAIHMETDPQTISAYLIYLSQHTPVEEQGPHSDLALDVARLVVERSTIMAHLFSKPSCSTASDAVLSALLSVFSRYVRRMRKSKEGEEVYSWSESQDQVFLRWSSGETATMHILVVHAMVILLTLGPPRSGDSEFSELLDIWFPEKKPLPTAFLVDTSEEALLLPDWLKLRMIRSEVPRLVDAALQDLEPQQLLLFVQSFGIPVSSMSKLLQYLDQAVAQDPQTLEQNIMDKNYMAHLVEVQHERGASGGQTFHSLLTASLPPRRDSTEAPKPESSPEPPPGQGRTRAGTQVPVLGPEDDLAGIFLQIFPLSPDPRWQSSSPRPLALALQQALGQELARVRQGNPEVPGITVRLLQAMTTLLSSPHGGTLALAMHHSHFLSCPLMRQLYQYQRAVPQDTGFSSLFLKVLMQILQWLDSPAVEDGPLQAQLKLFATRYSARHRISDVRSGLLHLADALSFHGDLEVANSTARAVIATLRSGEKCPVEPELISKVLRGLIEVRSPHLEELLTALFSATTETSCPSPASGPIVVVSSLLLQEKEELLGPSKQEVEGASTEAMRLGPASGLLVDWLETLDPEVVCSCPDLQWKLLFSRRKGKGHISAQVLSFRPYLLALLTHQASWSTLHCCIRVLLGKSREQRLDPSASLDFLWACIHVPRIWQGRDQRTPQKRREELVLHVQGPELLSLVELILSEAETRSQDGDSAARTLIQTRLPLLLSCCRSNDESIGKVTEHLTSCIQQWGDSVLGQRCRDLLLQLYLQRPEVRVPVPEVLLQSEGATSSSICKLDGLVHRFITLLADTSDSRSSESRVADANMACRKLAVAHPVLLLRHLPMIAALLHGRTHLNFQEFRQQNHLAFFLHVLGILELLQPRVFQSEHQGALWDCLRSFIRLLLNYRKSSRHLAPFISKFVQFIHKYVGCSAPAAVAFLQKHAEPLHDLSFDNSDLVMLKSLLAGLSLPSRDGRTDQGLDEEGEDERSAGSLPLVSVSLSTPLTVADVAPHMKRLSRGRAVEDVLETLSDIDEMSRRRPEVLGFFSTNLQRLMSSAEESCRNLAFSLALRSIQNNPSIAADFLPTFMYCLGSRDFEVVQTALRNLPEYTLLCQEHAAVLLHRAFLVGVYGQIDTSAQISEALKILHMEAVM

SEQ ID NO: 713 - protein, 510 aa, mus musculus
MSSFGYDPYFSTSYKRRYVETPRVHISSVRSGYSTARSAYSSYSAPVSSSLSVRRSYSSSSGSLMPSLENLDLSQVAAISNDLKSIRTQEKAQLQDLNDRFASFIERVHELEQQNKVLEAELLVLRQKHSEPSRFRALYEQEIRDLRLAAEDATNEKQALQGEREGLEETLRNLQARYEEEVLSREDAEGRLMEARKGADEAALARAELEKRIDSLMDEIAFLKKVHEEEIAELQAQIQYAQISVEMDVSSKPDLSAALKDIRAQYEKLAAKNMQNAEEWFKSRFTVLTESAAKNTDAVRAAKDEVSESRRLLKAKTLEIEACRGMNEALEKQLQELEDKQNADISAMQDTINKLENELRSTKSEMARYLKEYQDLLNVKMALDIEIAAYRKLLEGEETRLSFTSVGSITSGYSQSSQVFGRSAYSGLQSSSYLMSARSFPAYYTSHVQEEQTEVEETIEATKAEEAKDEPPSEGEAEEEEKEKEEGEEEEGAEEEEAAKDESEDTKKKK

SEQ ID NO: 714 - protein, 212 aa, mus musculus
MAKQYDVLFRLLLIGDSGVGKTCLLCRFTDNEFHSSHISTIGVDFKMKTIDVDGIKVRIQIWDTAGQERYQTITKQYYRRAQGIFLVYDISSERSYQHIMKWVSDVDEYAPEGVQKILIGNKADEEQKRQVGREQGQQLAKEYGMDFYETSACTNLNIKESFTRLTELVLQAHRKELDGLRTRASNELALAELEEDEGKPEGPANSSKTCWC

SEQ ID NO: 715 - protein, 207 aa, mus musculus
MAKTYDYLFKLLLIGDSGVGKTCLLFRFSEDAFNTTFISTIGIDFKIRTIELDGKKIKLQIWDTAGQERFRTITTAYYRGAMGIMLVYDITNEKSFDNIKNWIRNIEEHASSDVERMILGNKCDMNDKRQVSKERGEKLAIDYGIKFLETSAKSSTNVEEAFFTLARDIMTKLNRKMNDSNSSGAGGPVKITESRSKKTSFFRCSLL

SEQ ID NO: 716 - protein, 220 aa, mus musculus
MASATDSRYGQKESSDQNFDYMFKILIIGNSSVGKTSFLFRYADDSFTPAFVSTVGIDFKVKTIYRNDKRIKLQIWDTAGQERYRTITTAYYRGAMGFILMYDITNEESFNAVQDWSTQIKTYSWDNAQVLLVGNKCDMEDERVVSSERGRQLADHLGFEFFEASAKDNINVKQTFERLVDVICEKMSESLDTADPAVTGAKQGPQLTDQQAPPHQDCAC

SEQ ID NO: 717 - protein, 205 aa, mus musculus
MSSMNPEYDYLFKLLLIGDSGVGKSCLLLRFADDTYTESYISTIGVDFKIRTIELDGKTIKLQIWDTAGQERFRTITSSYYRGAHGIIVVYDVTDQESFNNVKQWLQEIDRYASENVNKLLVGNKCDLTTKKVVDYTTAKEFADSLGIPFLETSAKNATNVEQSFMTMAAEIKKRMGPGATAGGAEKSNVKIQSTPVKQSGGGCC

SEQ ID NO: 718 - protein, 1887 aa, mus musculus
MGFCKADAATSFLRAARSGNLDKALDHLRNGVDINTCNQNGLNGLHLASKEGHVKMVVELLHKEIILETTTKKGNTALHIAALAGQDEVVRELVNYGANVNAQSQKGFTPLYMAAQENHLEVVKFLLENGANQNVATEDGFTPLAVALQQGHENVVAHLINYGTKGKVRLPALHIAARNDDTRTAAVLLQNDPNPDVLSKTGFTPLHIAAHYENLNVAQLLLNRGASVNFTPQNGITPLHIASRRGNVIMVRLLLDRGAQIETRTKDELTPLHCAARNGHVRISEILLDHGAPIQAKTKNGLSPIHMAAQGDHLDCVRLLLQYNAEIDDITLDHLTPLHVAAHCGHHRVAKVLLDKGAKPNSRALNGFTPLHIACKKNHIRVMELLLKTGASIDAVTESGLTPLHVASFMGHLPIVKNLLQRGASPNVSNVKVETPLHMAARAGHTEVAKYLLQNKAKANAKAKDDQTPLHCAARIGHTGMVKLLLENGASPNLATTAGHTPLHTAAREGHVDTALALLEKEASQACMTKKGFTPLHVAAKYGKVRLAELLLEHDAHPNAAGKNGLTPLHVAVHHNNLDIVKLLLPRGGSPHSPAWNGYTPLHIAAKQNQIEVARSLLQYGGSANAESVQGVTPLHLAAQEGHTEMVALLLSKQANGNLGNKSGLTPLHLVSQEGHVPVADVLIKHGVTVDATTRMGYTPLHVASHYGNIKLVKFLLQHQADVNAKTKLGYSPLHQAAQQGHTDIVTLLLKNGASPNEVSSNGTTPLAIAKRLGYISVTDVLKVVTDETSVVLVSDKHRMSYPETVDEILDVSEDEGDELVGSKAERRDSRDVGEEKELLDFVPKLDQVVESPAIPRIPCVTPETVVIRSEDQEQASKEYDEDSLIPSSPATETSDNISPVASPVHTGFLVSFMVDARGGSMRGSRHNGLRVVIPPRTCAAPTRITCRLVKPQKLNTPPPLAEEEGLASRIIALGPTGAQFLSPVIVEIPHFASHGRGDRELVVLRSENGSVWKEHKSRYGESYLDQILNGMDEELGSLEELEKKRVCRIITTDFPLYFVIMSRLCQDYDTIGPEGGSLRSKLVPLVQATFPENAVTKKVKLALQAQPVPDELVTKLLGNQATFSPIVTVEPRRRKFHRPIGLRIPLPPSWTDNPRDSGEGDTTSLRLLCSVIGGTDQAQWEDITGTTKLIYANECANFTTNVSARFWLSDCPRTAEAVHFATLLYKELTAVPYMAKFVIFAKMNDAREGRLRCYCMTDDKVDKTLEQHENFVEVARSRDIEVLEGMPLFAELSGNLVPVKKAAQQRSFHFQSFRENRLAIPVKVRDSSREPGGFLSFLRKTMKYEDTQHILCHLNITMPPCTKGSGAEDRRRTLTPLTLRYSILSESRLGFTSDTDRVEMRMAVIREHLGLSWAELARELQFSVEDINRIRVENPNSLLDQSTALLTLWVDREGENAKMENLYTALRNIDRSEIVNMLEGSGRQSRNLKPERRHGDREYSLSPSQVNGYSSLQDELLSPASLQYALPSPLCADQYWNEVAVIDAIPLAATEHDTMLEMSDMQVWSAGLTPSLVTAEDSSLECSKAEDSDAIPEWKLEGAHSEDTQGPELGSQDLVEDDTVDSDATNGLADLLGQEEGQRSEKKRQEVSGTEQDTETEVSLVSGQQRVHARITDSPSVRQVLDRSQARTLDWDKQGSTAVHPQEATQSSWQEEVTQGPHSFQRRITTIQGPEPGALQEYEQVLVSTREHVQRGPPETGSPKAGKEPSLWAPESAFSQEVQGDELQNIPGEQVTEEQFTDEQGNIVTKKIIRKVVRQVDSSGAIDTQQHEEVIVEGPLADPGDLEADIESFMKLTKVELRGSGLQPDLIEGRKGAQIVKRASLKRGKQ

SEQ ID NO: 719 - protein, 62 aa, mus musculus
MGVQVETISPGDGRTFPKRGQTCVVHYTDECGSESQTDNLLRLCLWSHRAPRHHPTTCHSCF

SEQ ID NO: 720 - protein, 298 aa, mus musculus
VQFHPGYRGLVDGGEHIREATWESVSMMLQLGGTVIGSARCKDFREREGRLRAAHNLVKRGITNLCVIGGDGSLTGADTFRSEWSDLLNDLQKDGKITAEEATKSSYLNIVGLVGSIDNDFCGTDMTIGTDSALHRIVEIVDAITTTAQSHQRTFVLEVMGRHCGYLALVTSLSCGADWVFIPECPPDDDWEEHLCRRLSETRTRGSRLNIIIVAEGAIDKNGKPITSEDIKNLVVKRLGYDTRVTVLGHVQRGGTPSAFDRILGSRMGVEAVMALLEGTPDTPACVVSLSGNQGGIG

SEQ ID NO: 721 - protein, 3160 aa, mus musculus
MASRARRTAKFSSFQPILAQSPRLLLLLLLLSLVSYVSTQAAGPGAALQSLGLSGTSGVPTEEAIVVANRGLRVPFGREVWLDPLRDLVLQVQPGDRCTVTVLDNDALAQRPGHLSPKRFACDYGPGEVRYSHLGARSPSRDRVRLQLRYDAPGGAIVLPLALEVEVVFTQLEIVTRNLPLVVEELLGTSNALDDRSLEFAYQPETEECRVGILSGLSALPRYGELLHYPQVQGGAGDRGTSKTLLMDCKAFQELGVRYRHTAPSRSPNRDWLPMVVELHSRGAPEGSPALKREHFQVLVRIRGGAENTAPKPSFVAMMMMEVDQFVLTALTPDMLAAEDAESDPDLLIFNLTSAFQPGQGYLVSTDDRSLPLSSFTQRDLRLLKIAYQPPSEDSDQERLFELELEIVDPEGAASDPFAFMVVVKPMNTLAPVVTRNTGLILYEGQYRPLTGPIGSGPQNLVISDEDDLEAVRLEVVAGLRHGHLVILGSPSSDSAPKTFTVAELAAGQVVYQHDDKDGSLSDNLVLRMSDGGGRHQVQFLFPITLVPVDDQPPVLNANTGLTVAEGETVPIPPLTLSATDIDSDDSQLVFVLLPPFSSLGHLLLRQRHVPQEEQGLWQKQGSFYERTVTEWRQQDITEGKLFYRHSGPHSPGPVMDQFMFRVQDNHDPPNQSGIQRFVIRIHPVDRLPPELGSGCPLRMVVQESQLTPLRKRWLHYTDLDTDDRELQYTVTQPPTDTDENHSPAPLGTLVFTDNPSVVVSHFTQAQVNHHKIAYRPPGQELGVAARVAQFQFQVEDRAGNVAPGTFTLYLQPVDNQPPEIVNTGFTVEEKGHHILRETELHVSDVDTDVTHISFTLTQAPKHGHMQISGRPLHVGGQFHLEDIKHGRISYWNSGDESLTDSCSLEVSDRHHVVPITLRVNVRPGDREGPMSVLPAGTLESYLDVLENGATEVTANIIKGAYQGTDDLMLTFLLEGPPSYGEILVNGAPAEQFTQRDILEGSVVYAHTSGEIGLLPKADSFNLSLSAMSQEWRIGSSIVQGVTVWVTILPVDSQAPEISLGEQFVVLEGDKSVISLTHLSAEDMDSLKDDLLCTIVIQPTSGYVENISPAPGSEKSRAGVAISAFTLKDLRQGHINYVQSVHRGVEPVEDRFIFRCSDGINFSERQIFPIVIIPTNDEQPEMFMREFMVMEGMSLVVNRLILNAADADIPRDDLTFTITRFPTHGHVMNQLINGTVLVESFTLDQIIESSSIIYEHDDSETQEDSFVIKLTDGKHSVEKMVLIVVIPVDDETPRMTINNGLEIEIGETKVINNKVLMATDLDSDDKSLVYIIRYGPGHGLLQRQKPLGAFENITLGMNFTQDEVDRNLIQYVHFGQEGIRDLIKFDVTDGTNALIDRYFYVTIGSVDIVFPDVVSKGVSLKEGGKVTLTTDLLSTSDLNSPDENLVFTITRAPMRGHLECTDRRGLSITSFTQLQLAGNKIYYIHTAEDEVKMDSFEFQVTDGRNPVFRTFRISISDVDNKKPVVTIHNLVVSESESKLITPFELTVEDRDTPDRLLKFIVTQVPVHGHLLFNNTRSVMVFTKQDLNENLISYKHDGTESTEDSFSFTVTDGTHSDFYVFPDTVFETRRPQVMKIQVLPVDNSVPQIVVNKGASTLRTLATGHLGFMITSKILKVEDRDSLHFSLRFIVTEAPQHGYLLNLGQGNHSVTQFTQADIDDMKICYVLRERANATSDMFHFIVEDDGGNRLTNQHFRLNWAWISFEKEYYLINEDSKFLDIVLTRRGYLGETSFISIGTRDGTAEKDRDFKGKAQKQVQFNPGQTRASWRVRILSDGEHEHSETFQVVLSEPVLAILEFPTVTTVEIIDPGDESTVFIPQSEYSVEEDVGELFIPIRRSGDISRELMVICYTQQGTATSTVRTSVLSYSDYISRPEDHSSVIRFDKDEREKMCRILVIDDSLYEEEETFQVLLSMPMGGRIGDKFPGANVTILTDRDDEPAFYFGDTQYSVDESAGYVELQVWRTGTDLSKPSSVTVRSRKTESLSADAGTDYVGISRNLDFAPGVNMQTVRVVILDDLGRPILEGIEKFELVLRMPMNAALGEPSKATVSINDSASDLPKMQFKERVYTCNENDGRVVAMIYRSGDIQHRSSVRCYTRQGSAQVMMDFEERPNTDVSTVTFLPGETEKPCVLELMDDAVYEDVEELRLVLGTPQGSSAFGAAVGEQNETLIKIQDEADKAVIKFGETKFSVTEPSRPGESVVVKIPVIRQGDTSKVSIVRVHTKDGSATSGEDYHPVSEEIEFKEGETQHTVEIEVIFDGVREMREAFTVHLKPDENMVAETQATKAIVYIEEIHSMADVTFPSVPHIVSLLIYDDPSKGREDTGPVSGYPVVCITACNPKYPDYEKTGSICASENINDTLTRYRWLISAPAGPDGVTSPMREVDFDTFFTSSKMITLDSIYFQPGSRVQCAARAVNTNGNEGLELMSPIVTIGREEGLCQPRVPGVVGAEPFSAKLRYTGPEDPDFANLIKLTVTMPHIDGMLPAISTRELSNFELTLSPDGTRVGNHKCSNLLDYNEVKTHHGFLTNATKNPEVIGETYPYQYSVPVRGSSTLRFYRNLNLEACLWEFVSYYDMTELLADCGGTIGTDGQVLNLVQSYVTLRVPLYVSYVFHSPVGVGGWQHFDLKSELRLTFVYDTAILWNHGIGSPPEAELQGSLYPTSMRIGEEGRLAVNFKTEAQFHGLFVLSHPASFTSSLIVSADHPGLTFSLRLIRSEPTYNQPVQQWSFVSDFAVRDYSGTYTVKLVPCTTPSNQEYRLPVTCNPREPVTFDLDIRFQQVSDPVATEFSLNTHMYLLSKKNLWLSDGSMGFGQESDVAFAEGDVIYGRVMVDPVQNLGDSFYCSIEKVFLCTGDDGYVPKYSPANAEYGCLADSPSLLHRFKIVDKAQPETQATSFGDVLFNAKLAVDDPEAVLLVNQPGSDGFKVDSTPLFQVALGREWYIHTIYTVKSKDNTHRGIGKRSLEYQYHSVVHPGPPQATTKSWKKRAVRSTPSLAGEIGAENNRGTNIQHISLNRRGKRQVPHGRIPPDGILPWELNSPSSEVSLVTVLGGLTVGLLTVCLAVAAAVMCRNRSTKGKDTPKGSGSTEPMMSPQSHYNDSSEV

SEQ ID NO: 722 - protein, 315 aa, mus musculus
NLGNESAPKIFILLGFSSHPWLEMPLFIMVLVAYVCTVLGNISIIVVSRRDPQLDSPMYFFLSNLSFLDLCFTTTTIPQLLRNLWGPDKSISYGGCVTQFYIFHFLGATECILLAVMSLDRYIAICKPLRYPAIMHQQLCILLVSMAWLSGLANSLLQSTLTVKLPFCGNNKVDNFLCEVPVMIKMSCANTAFNIAMLSIVGTFYSLVPLSLILISYGFIVATVLRIRSSEGKKKAFNTCGSHVVVVTLFYGPVISMYVQPSSSNSQDKNKLLSLFYSLVTPMLNPFIYTLRNKDMKGAMKRLLVSLYHKGAEQT

SEQ ID NO: 723 - protein, 579 aa, mus musculus
MNFLRRRLSDSSFVANLPNGYMPDLQRPESSSSSPASPATERRHPQPLAASFSSPGSSLFSSFSSAVKQTPQAPSGLMEPPTPVTPVVQRPRILLVIDDAHTDWSKYFHGKKVNGDIEIRVEQAEFSELNLAAYVTGGCMVDMQVVRNGTKIVRSFKPDFILVRQHAYSMALAEDYRSLVIGLQYGGLPAVNSLYSVYNFCSKPWVFSQLIKIFHSLGPEKFPLVEQTFFPNHKPMLTAPNFPVVIKLGHAHAGMGKIKVENQHDYQDITSVVAMAKTYATTEAFIDSKYDIRIQKIGSNYKAYMRTSISGNWKANTGSAMLEQVAMTERYRLWVDSCSEMFGGLDICAVKAVHSKDGRDYIIEVMDSSMPLIGEHVEEDKQLMADLVVSKMSQLLVPGATVPSPLRPWGPQTKPAKSPGQGQLGPLLGQPQPRPPPQGGPRQAQSPQPPRSRSPSQQRLSPQGQQPVSPQSGSPQQQRSPGSPQLSRASGGSSPNQASKPSASLSSHNRPPVQGRSTSQQGEEPQKSASPHPHLNKSQSLTNSLSTSDTSHRGTPSEDEAKAETIRNLRKSFASLFSD

SEQ ID NO: 724 - protein, 413 aa, mus musculus
MTPSISWGLLLLAGLCCLVPSFLAEDVQETDTSQKDQSPASHEIATNLGDFAISLYRELVHQSNTSNIFFSPVSIATAFAMLSLGSKGDTHTQILEGLQFNLTQTSEADIHKSFQHLLQTLNRPDSELQLSTGNGLFVNNDLKLVEKFLEEAKNHYQAEVFSVNFAESEEAKKVINDFVEKGTQGKIVEAVKELDQDTVFALANYILFKGKWKKPFDPENTEEAEFHVDKSTTVKVPMMTLSGMLDVHHCSTLSSWVLLMDYVGNASAVFLLPEDGKMQHLEQTLSKELISKILLNRHRRLVQIHIPRLSISGDYNLKTLMSPLGITRIFNNGADLSGITEENAPLKLSKAVHKAVLTIDETGTEAAAATVFEAVPMSMPPILRFDHPFLFIIFEEHTQSPIFVGKVVDPTHK

SEQ ID NO: 725 - protein, 582 aa, mus musculus
MIFLATLPLFWIMISASRGGHWGAWMPSTISAFEGTCVSIPCRFDFPDELRPAVVHGVWYFNSPYPKNYPPVVFKSRTQVVHESFQGRSRLLGDLGLRNCTLLLSTLSPELGGKYYFRGDLGGYNQYTFSEHSVLDIVNTPNIVVPPEVVAGTEVEVSCMVPDNCPELRPELSWLGHEGLGEPTVLGRLREDEGTWVQVSLLHFVPTREANGHRLGCQAAFPNTTLQFEGYASLDVKYPPVIVEMNSSVEAIEGSHVSLLCGADSNPPPLLTWMRDGMVLREAVAESLYLDLEEVTPGEDGVYACLAENAYGQDNRTVELSVMYAPWKPTVNGTVVAVEGETVSILCSTQSNPDPILTIFKEKQILATVIYESQLQLELPAVTPEDDGEYWCVAENQYGQRATAFNLSVEFAPIILLESHCAAARDTVQCLCVVKSNPEPSVAFELPSRNVTVNETEREFVYSERSGLLLTSILTIRGQAQAPPRVICTSRNLYGTQSLELPFQGAHRLMWAKIGPVGAVVAFAILIAIVCYITQTRRKKNVTESSSFSGGDNPHVLYSPEFRISGAPDKYESREVSTRDCH

SEQ ID NO: 726 - protein, 1033 aa, mus musculus
MLGTGPAVATASAATSSNVSVLQQFASGLKSRNEETRTKAAKELQHYVTMELREMSQEESTRFYDQLNHHIFELVSSSDANERKGGILAIASLIGVEGGNSTRIGRFANYLRNLLPSSDPVVMEMASKAIGRLAMAGDTFTAEYVEFEVKRALEWLGADRNEGRRHAAVLVLRELAISVPTFFFQQVQPFFDNIFVAVWDPKQAIREGAVAALRACLILTTQREPKEMQKPQWYRHTFEEAEKGFDETLAKEKGMNRDDRIHGALLILNELVRISSMEGERLREEMEEITQQQLVHDKYCKDLMGFGTKPRHITPFTSFQAVQPQQPNALVGLLGYSSPQGLMGFGTSPSPAKSTLVESRCCRDLMEEKFDQVCQWVLKCRSSKNSLIQMTILNLLPRLAAFRPSAFTDTQYLQDTMNHVLSCVKKEKERTAAFQALGLLSVAVRSEFKVYLPRVLDIIRAALPPKDFAHKRQKTVQVDATVFTCISMLARAMGPGIQQDIKELLEPMLAVGLSPALTAVLYDLSRQIPQLKKDIQDGLLKMLSLVLMHKPLRHPGMPKGLAHQLASPGLTTLPEASDVASITLALRTLGSFEFEGHSLTQFVRHCADHFLNSEHKEIRMEAARTCSRLLTPSIHLISGHAHVVSQTAVQVVADVLSKLLVVGITDPDPDIRYCVLASLDERFDAHLAQAENLQALFVALNDQVFEIRELAICTVGRLSSMNPAFVMPFLRKMLIQILTELEHSGIGRIKEQSARMLGHLVSNAPRLIRPYMEPILKALILKLKDPDPDPNPGVINNVLATIGELAQVSGLEMRKWVDELFIIIMDMLQDSSLLAKRQVALWTLGQLVASTGYVVEPYRKYPTLLEVLLNFLKTEQNQGTRREAIRVLGLLGALDPYKHKVNIGMIDQSRDASAVSLSESKSSQDSSDYSTSEMLVNMGNLPLDEFYPAVSMVALMRIFRDQSLSHHHTMVVQAITFIFKSLGLKCVQFLPQVMPTFLNVIRVCDGAIRETGFLCVALAVLELTLQTRLASTS

SEQ ID NO: 727 - protein, 932 aa, mus musculus
LERERERERERQRERERERERERERERDKSCKLVALKLIRQARAVCYYLFNTTHNDLVPPRRDTMRVHYLWLLLILGHVASARYSSANDWTVDHPQTLFAWEGACIRIPCKYKTPLPKARLDNILLFQNYEFDKATKKFTGTVLYNATKTEKDPESELYLSKQGRVTFLGNRIDNCTLKIHPIRANDSGNLGLRMTAGTERWMEPIHLNVSEKPFQPYIQMPSEIRESQSVTLTCGLNFSCFGYDILLKWFLEDSEITSITSSVTSITSSVTSSIKNVYTESKLTFQPKWTDHGKSVKCQVQHSSKVLSECTVHLDVKYTPKLEIKVNPTEVEKNNSVTMTCRVNSSNPKLRTVAVSWFKDGRPLEDQELEQEQQMSKLILHSVTKDMRGKYRCQASNDIGPGESEEVELTVHYAPEPSRVHIYPSPAEEGQSVELICESLASPSATNYTWYHNRKPIPGDTQEKLRIPKVSPWHAGNYSCLAENRLGHGKIDQEAKLDVHYAPKAVTTVIQSFTPILEGDSVTLVCRYNSSNPDVTSYRWNPQGSGSVLKPGVLRIQKVTWDSMPVSCAACNHKCSWALPVILNVHYAPRDVKVLKVSPASEIRAGQRVLLQCDFAESNPAEVRFFWKKNGSLVQEGRYLSFGSVSPEDSGNYNCMVNNSIGETLSQAWNLQVLYAPRRLRVSISPGDHVMEGKKATLSCESDANPPISQYTWFDSSGQDLHSSGQKLRLEPLEVQHTGSYRCKGTNGIGTGESPPSTLTVYYSPETIGKRVALGLGFCLTIFILAIWGMKIQKKWKQNRSQQGLQENSSGQSFFVRNKKARRTPLSEGPQSQGCYNPAMDDTVSYAILRFPESDTHNAGDAGTPATQAPPPNNSDTVTYSVIQKRPMGDYENVNPSCPEDESIHYSELVQFGAGKRPQAKEDVDYVTLKH

SEQ ID NO: 728 - protein, 607 aa, mus musculus
MDNLSDTLKKLKITAADRTEGSLEGCLDCLLQALAQNNAETSEKIQGSGILQLFANLLTPQASCTAKVADIIAEVAKNEFMRIPCVDAGLISPLVQLLNSKDQEVLLQTGRALGNICYDSHEGRSAVDQAGGAQIVIDHLRSLCGRTDPASEKLMTVFCGMLMNYSNENDSLQAQLISMGVIPTLVKLLGIHCHNAALTEMCLVAFGNLAELESSKEQFASTNIAEELVKLFKKQIEHDKREMIFEVLAPLAENDAIKLQLVEAGLVECLLEIVQQKVNSNKEDDVAELKTASDLMVLLLLGDESMQKLFEGGKGSVFQRVLSWIPSNNHQLQLAGALAIANFARNDGNCIHMVDNGIVEKLMDLLDRHVEDGNVTVQHAALSALRNLAIPVVNKAKMLSAGVTETVLKFLKSEMPPVQFKLLGTLRMLIDAQAEAAEQLGKNAKLVERLVEWCEAKDHAGVMGESNRLLSALIRHSKSKDVIKTIVQSGGIKHLVTMATSEHVIMQNEALVALALIAALELGPAEKDLASAQLVQILHRLLADERSAPEIKYNSMVLICALMGSESLYKEVQDLAFLDVVSKLRSHENKSVAQQASLTEQRLTVES

SEQ ID NO: 729 - protein, 808 aa, mus musculus
MAERGGAGGGPGGSGGGSSQRGSGVAQSPQQQPQQQPPQPQQPTPPKLAQATSSSSSTSAAAASSSSSSTSTSMAVAVASGSAPPGGPGPGRTPAPVQMNLYATWEVDRSSSSCVPRLFSLTLKKLVMLKEMDKDLNSVVIAVKLQGSKRILRSNEIILPASGLVETELQLTFSLQYPHFLKRDANKLQIMLQRRKRYKNRTILGYKTLAVGLINMAEVMQHPNEGALVLGLHSNVKDVSVPVAEIKIYSLSSQPIDHEGIKSKLSDRSPDIDNYSEEEEESFSSEQEGSDDPLHGQDLFYEDEDLRKVKKTRRKLTSTSAITRQPNIKQKFVALLKRFKVSDEVGFGLEHVSREQIREVEEDLDELYDSLEMYNPSDSGPEMEETESILSTPKPKLKPFFEGMSQSSSQTEIGSLNSKGSLGKDTTSPMELAALEKVKSTWIKNQDDSLTETDTLEITDQDMFGDVSTSLVVPEKVKTPMKSSKADLQGSASPSKVEGTHTPRQKRSTPLKERQLSKPLSERTNSSDSERSPDLGHSTQIPRKVVYDQLNQILVSDAALPENVILVNTTDWQGQYVAELLQDQRKPVVCTCSTVEVQAVLSALLTRIQRYCNCNSSMPRPVKVAAVGSQSYLSSILRFFVKSLASKTPDWLGYMRFLIIPLGSHPVAKYLGSVDSRYSSTFLDSAWRDLFSRSEPPVSEPLDVVGRVMQYVNGATTTHQLPVAEAMLTCRHKFPDEDSYQKFIPFIGVVKVGLVEDSPSTAGDGDDSPVVSLTVPSTSPPSSSGLSRDATATPPSSPSMSSALAIVG

SEQ ID NO: 730 - protein, 315 aa, mus musculus
MSKSAADLISQARKKGNVVFGEPITASLGIDGTHYWSKNWAKAAAFVTSPPLSPDPTTPDYINSLLASGDLQLSGSAHCTFSTAQKAIGKDNFTAIPEGTNGVEERMSVIWDKAVATGKMDENQFVAVTSTNAAKIFNLYPRKGRIAVGSDSDLVIWDPDALKIVSAKNHQSVAEYNIFEGMELRGAPLVVICQGKIMLEDGNLHVTQGAGRFIPCSPFSDYVYKRIKARRKMADLHAVPRGMYDGPVFDLTTTPKGGTPAGSTRGSPTRPNPPVRNLHQSGFSLSGTQVDEGVRSASKRIVAPPGGRSNITSLS

SEQ ID NO: 731 - protein, 1011 aa, mus musculus
MATAATEEPFPFHGLLPKKETGASSFLCRYPEYDGRGVLIAVLDTGVDPGAPGMQVTTDGKPKIIDIIDTTGSGDVNTATEVEPKDGEIIGLSGRVLKIPANWTNPLGKYHIGIKNGYDFYPKALKERIQKERKEKIWDPIHRVALAEACRKQEEFDIANNGSSQANKLIKEELQSQVELLNSFEKKYSDPGPVYDCLVWHDGETWRACVDSNENGDLSKCAVLRNYKEAQEYSSFGTAEMLNYSVNIYDDGNLLSIVTSGGAHGTHVASIAAGHFPEEPERNGVAPGAQILSIKIGDTRLSTMETGTGLIRAMIEVINHKCDLVNYSYGEATHWPNSGRICEVINEAVWKHNTIYVSSAGNNGPCLSTVGCPGGTTSSVIGVGAYVSPDMMVAEYSLREKLPANQYTWSSRDPSADGALGVSISAPGGAIASVPNWTLRGTQLMNGTSMSSPNACGGIALVLSGLKANNVDYTVHSVRRALENTAIKADNIEVFAQGHGIIQVDKAYDYLIQNTSFANRLGFTVTVGNNRGIYLRDPVQVAAPSDHGVGIEPVFPENTENSEKISFQLHLALTSNSSWVQCPSHLELMNQCRHINIRVDPRGLREGLHYTEVCGYDIASPNAGPLFRVPITAVIAAKVNESSHYDLAFTDVHFKPGQIRRHFVEVPEGATWAEVTVCSCSSEVSAKFVLHAVQLVKQRAYRSHEFYKFCSLPEKGTLIEAFPVLGGKAIEFCIARWWASLSDVNIDYTISFHGIVCTAPQLNIHASEGINRFDVQSSLKYEDLAPCITLKSWVQTLRPVNAKTRPLGSRDVLPNNRQLYEMVLTYSFHQPKSGEVTPSCPLLCELLYESEFDSQLWIIFDQNKRQMGSGDAYPHQYSLKLEKGDYTIRLQIRHEQISDLDRLKDLPFIVSHRLSNTLSLDIHENHSLALLGKKKSSSLTLPPKYNQPFFVTSLPDDKIPKGAGPGCYLAGSLTLSKTELGKKADVIPVHYYLIPPPTKIKNGSKDKEKDS

SEQ ID NO: 732 - protein, 2179 aa, mus musculus
MEEVVIAGMSGKLPESENLQEFWANLIGGVDMVTDDDRRWKAGLYGLPKRSGKLKDLSKFDASFFGVHPKQAHTMDPQLRLLLEVSYEAIVDGGINPASLRGTNTGVWVGVSGSEASEALSRDPETLLGYSMVGCQRAMMANRLSFFFDFKGPSIALDTACSSSLLALQNAYQAIRSGECPAALVGGINLLLKPNTSVQFMKLGMLSPDGTCRSFDDSGSGYCRSEAVVAVLLTKKSLARRVYATILNAGTNTDGSKEQGVTFPSGEVQEQLICSLYQPAGLAPESLEYIEAHGTGTKVGDPQELNGITRSLCAFRQAPLLIGSTKSNMGHPEPASGLAALTKVLLSLEHGVWAPNLHFHNPNPEIPALLDGRLQVVDRPLPVRGGNVGINSFGFGGSNVHVILQPNTRQAPAPTAHAALPHLLHASGRTLEAVQDLLEQGRQHSQDLAFVSMLNDIAATPTAAMPFRGYTVLGVEGRVQEVQQVSTNKRPLWFICSGMGTQWRGMGLSLMRLDSFRESILRSDEAVKPLGVKVSDLLLSTDERTFDDIVHAFVSLTAIQIALIDLLTSVGLKPDGIIGHSLGEVACGYADGCLSQREAVLAAYWRGQCIKDAHLPPGSMAAVGLSWEECKQRCPAGVVPACHNSEDTVTISGPQAAVNEFVEQLKQEGVFAKEVRTGGLAFHSYFMEGIAPTLLQALKKVIREPRPRSARWLSTSIPEAQWQSSLARTSSAEYNVNNLVSPVLFQEALWHIPEHAVVLEIAPHALLQAVLKRGVKSSCTIIPLMKRDHKDNLEFFLTNLGKVHLTGINVNPNALFPPVEFPAPRGTPLISPHIKWDHSQTWDVPVAEDFPNGSSSSSATVYSIDASPESPDHYLVDHCIDGRVIFPGTGYLCLVWKTLARSLGLSLEETPVVFENVSFHQATILPKTGTVALEVRLLEASHAFEVSDTGNLIVSGKVYLWEDPNSKLFDHPEVPTPPESASVSRLTQGEVYKELRLRGYDYGPQFQGICEATLEGEQGKLLWKDNWVTFMDTMLQVSILGSSQQSLQLPTRVTAIHIDPATHRQKVYRLKEDTQVADVTTSRCLGITVSGGIHISRLQTTATSRRQQEQLVPTLEKFVFTPHMEAECLSESTALQKELQLCKGLARALQTKATQQGLKAAMLGQEDPPQHGLPRLLAAACQLQLNGNLQLELGEALAQERLLLPEDPLISGLLNSQALKACVDTALENLSTLKMKVAEVLAGEGHLYSRIPALLNTQPMLQLEYTATDRHPQALKDVQTKLQQHDVAQGQWNPSDPAPSSLGALDLLVCNCALATLGDPALALDNMVAALKEGGFLLVHTVLKGHALGETLACLPSEVQPAPSLLSQEEWESLFSRKALHLVGLKRSFYGTALFLCRRAIPQEKPIFLSVEDTSFQWVDSLKSTLATSSSQPVWLTAMDCPTSGVVGLVNCLRKEPGGHRIRCILLSNLSNTSHAPKLDPGSPELQQVLKHDLVMNVYRDGAWGAFRHFQLEQDKPKEQTAHAFVNVLTRGDLASIRWVSSPLKHTQPSSSGAQLCTVYYASLNFRDIMLATGKLSPDAIPGKWASRDCMLGMEFSGRDRCGRRVMGLVPAEGLATSVLLSSDFLWDVPSSWTLEEAASVPVVYTTAYYSLVVRGRIQRGETVLIHSGSGGVGQAAISIALSLGCRVFTTVGSAEKRAYLQARFPQLDDTSFANSRDTSFEQHVLLHTGGKGVDLVLNSLAEEKLQASVRCLAQHGRFLEIGKFDLSNNHPLGMAIFLKNVTFHGILLDALFEEANDSWREVAALLKAGIRDGVVKPLKCTVFPKAQVEDAFRYMAQGKHIGKVLVQVREEEPEAVLPGAQPTLISAISKTFCPAHKSYIITGGLGGFGLELARWLVLRGAQRLVLTSRSGIRTGYQAKHIREWRRQGIQVLVSTSNVSSLEGARALIAEATKLGPVGGVFNLAMVLRDAMLENQTPELFQDVNKPKYNGTLNLDRATREACPELDYFVAFSSVSCGRGNAGQTNYGFANSTMERICEQRRHDGLPGLAVQWGAIGDVGIVLEAMGTNDTVIGGTLPQRISSCMEVLDLFLNQPHAVLSSFVLAEKKAVAHGDGDTQRDLVKAVAHILGIRDLAGINLDSTLADLGLDSLMGVEVRQILEREHDLVLPMREVRQLTLR

SEQ ID NO: 733 - protein, 225 aa, mus musculus
PLFVWLFRSGCPVFFLQVLAKLGVAGQWRFADVLGLEEETLGSVPSPACALLLLFPLTAQHENFRKKQIEELKGQEVSPKVYFMKQTIGNSCGTIGLIHAVANNQDKLEFEDGSVLKQFLSETEKLSPEDRAKCFEKNEAIQAAHDSVAQEGQCRVDDKVNFHFILFNNVDGHLYELDGRMPFPVNHGASSEDSLLQDAAKVCREFTEREQGEVRFSAVALCKAA

SEQ ID NO: 734 - protein, 544 aa, mus musculus
MMPTPVILLKEGTDSSQGIPQLVSNISACQVIAEAVRTTLGPRGMDKLIVDGRGKATISNDGATILKLLDVVHPAAKTLVDIAKSQDAEVGDGTTSVTLLAAEFLKQVKPYVEEGLHPQIIIRAFRTATQLAVNKIKEIAVTVKKQDKVEQRKMLEKCAMTALSSKLISQQKVFFAKMVVDAVMMLDELLQLKMIGIKKVQGGALEESQLVAGVAFKKTFSYAGFEMQPKKYKNPKIALLNVELELKAEKDNAEIRVHTVEDYQAIVDAEWNILYDKLEKIHQSGAKVILSKLPIGDVATQYFADRDMFCAGRVPEEDLKRTMMACGGSIQTSVNALVPDVLGHCQVFEETQIGGERYNFFTGCPKAKTCTIILRGGAEQFMEETERSLHDAIMIVRRAIKNDSMVAGGGAIEMELSKYLRDYSRTIPGKQQLLIGAYAKALEIIPRQLCDNAGFDATNILNKLRARHAQGGMWYGVDINNENIADNFQAFVWEPAMVRINALTAASEAACLIVSVDETIKNPRSTVDPPAPSAGRGRGQARFH

SEQ ID NO: 735 - protein, 392 aa, mus musculus
VVISLLAFGVYPNVCYHKEKRKILTTEGRNALIHKSSVNCPFSSQDMKYPSPFFVFGEKIRTRAISAKGMTLVTPLQLLLFASKKVQSDGQIVFIDDWIRLQISHEAAACITALRAAMEALVVEVSKQPNIISQLDPVNEHMLNTIRQISRPSAAGINLMIGSVRYGDGPRPPKMARYDNGSGYRRGYGGGGYGGGGYGGGYGSGGFGGGFGSGGGFGGGFNSGGGGFGSGGGGFGSGGGGFGGGGGGFSGGGGGGFGGGRGGGGGGFGGSGGFGSGGGGYGVGGGGYGGGGGGGYGGGSGGYGGGGGGYGGGEGYSISPNSYRGNYGGGGGGYRGGSQGGYRNNFGGDYRGSSGDYRGSGGGYRGSGGFQRRGYGGGYFGQGRGGGGGGGY

SEQ ID NO: 736 - protein, 466 aa, mus musculus
MSTRSVSSSSYRRMFGGSGTSSRPSSNRSYVTTSTRTYSLGSALRPSTSRSLYSSSPGGAYVTRSSAVRLRSSVPGVRLLQDSVDFSLADAINTEFKNTRTNEKVELQELNDRFANYIDKVRFLEQQNKILLAELEQLKGQGKSRLGDLYEEEMRELRRQVDQLTNDKARVEVERDNLAEDIMRLREKLQEEMLQREEAESTLQSFRQDVDNASLARLDLERKVESLQEEIAFLKKLHDEEIQELQAQIQEQHVQIDVDVSKPDLTAALRDVRQQYESVAAKNLQEAEEWYKSKFADLSEAANRNNDALRQAKQESNEYRRQVQSLTCEVDALKGTNESLERQMREMEENFALEAANYEDTIGRLQDEIQNMKEEMARHLREYQDLLNVKMALDIEIATYRKLLEGEESRISLPLPTFSSLNLRETNLESLPLVDTHSKRTLLIKTVETRDGQVINETSQHHDDLE

SEQ ID NO: 737 - protein, 875 aa, mus musculus
MELITILEKTVSPDRLELEAAQKFLERAAVENLPTFLVELSRVLANPGNSQVARVAAGLQIKNSLTSKDPDIKAQYQQRWLAIDANARREVKNYVLQTLGTETYRPSSASQCVAGIACAEIPVSQWPELIPQLVANVTNPNSTEHMKESTLEAIGYICQDIDPEQLQDKSNEILTAIIQGMRKEEPSNNVKLAATNALLNSLEFTKANFDKESERHFIMQVVCEATQCPDTRVRVAALQNLVKIMSLYYQYMETYMGPALFAITIEAMKSDIDEVALQGIEFWSNVCDEEMDLAIEASEAEQGRPPEHTSKFYAKGALQYLVPILTQTLTKQDENDDDDDWNPCKAAGVCLMLLSTCCEDDIVPHVLPFIKEHIKNPDWRYRDAAVMAFGSILEGPEPNQLKPLVIQAMPTLIELMKDPSVVVRDTTAWTVGRICELLPEAAINDVYLAPLLQCLIEGLSAEPRVASNVCWAFSSLAEAAYEAADVADDQEEPATYCLSSSFELIVQKLLETTDRPDGHQNNLRSSAYESLMEIVKNSAKDCYPAVQKTTLVIMERLQQVLQMESHIQSTSDRIQFNDLQSLLCATLQNVLRKVQHQDALQISDVVMASLLRMFQSTAGSGGVQEDALMAVSTLVEVLGGEFLKYMEAFKPFLGIGLKNYAEYQVCLAAVGLVGDLCRALQSNILPFCDEVMQLLLENLGNENVHRSVKPQILSVFGDIALAIGGEFKKYLEVVLNTLQQASQAQVDKSDFDMVDYLNELRESCLEAYTGIVQGLKGDQENVHPDVMLVQPRVEFILSFIDHIAGDEDHTDGVVACAAGLIGDLCTAFGKDVLKLVEARPMIHELLTEGRRSKTNKAKTLATWATKELRKLKNQA

SEQ ID NO: 738 - protein, 412 aa, mus musculus
MANVADTKLYDILGVPPGASENELKKAYRKLAKEYHPDKNPNAGDKFKEISFAYEVLSNPEKRELYDRYGEQGLREGSGGGGGMDDIFSHIFGGGLFGFMGNQSRSRNGRRRGEDMMHPLKVSLEDLYNGKTTKLQLSKNVLCSACSGQGGKSGAVQKCSACRGRGVRIMIRQLAPGMVQQMQSVCSDCNGEGEVINEKDRCKKCEGKKVIKEVKILEVHVDKGMKHGQRITFTGEADQAPGVEPGDIVLLLQEKEHEVFQRDGNDLHMTYKIGLVEALCGFQFTFKHLDARQIVVKYPPGKVIEPGCVRVVRGEGMPQYRNPFEKGDLYIKFDVQFPENNWINPDKLSELEDLLPSRPEVPDVIGETEEVELQEFDSTRGSGGGQRREAYNDSSDEESSSHHGPGVQCAHQ

SEQ ID NO: 739 - protein, 406 aa, mus musculus
MSASQDSRSRDNGPDGMEPEGVIESNWNEIVDSFDDMNLSESLLRGIYAYGFEKPSAIQQRAILPCIKGYDVIAQAQSGTGKTATFAISILQQIELDLKATQALVLAPTRELAQQIQKVVMALGDYMGASCHACIGGTNVRAEVQKLQMEAPHIIVGTPGRVFDMLNRRYLSPKYIKMFVLDEADEMLSRGFKDQIYDIFQKLNSNTQVVLLSATMPSDVLEVTKKFMRDPIRILVKKEELTLEGIRQFYINVEREEWRLDTLCDLYETLTITQAVIFINTRRKVDWLTEKMHARDFTVSAMHGDMDQKERDVIMREFRSGSSRVLITTDLLARGIDVQQVSLVINYDLPTNRENYIHRIGRGGRFGRKGVAINMVTEEDKRTLRDIETFYNTSIEEMPLNVADLI

SEQ ID NO: 740 - protein, 542 aa, mus musculus
MDLEAVCKRSALHAKPQGLILQYGTAGFRTNAQHLDHIMFRMGLLAVLRSKQTRSTIGVMVTASHNPEEDNGVKLVDPLGEMLAPSWEEHATCLASAEEQDVRQVLAAIVEKEAVDLTQTAFVVIARDTRPSSEKLSQSVIDGVTVLGGQFHDYGLLTTPQLHYMVYCRNSGGRYGQATVEGYCQKLSKAFVDLTNQVSCSGDVKRSVKVDCANGIGALKLREMEHYFSRGLSVLLFNDGTQGRLNHLCGADFVKSQQKPPQGIEMKSGERCCSFDGDADRIVYYYCDADGHFHLIDGDKIATLISSFLKELLLEIGESVNLGVVQTAYANGSSTRYLEEVMKVPVYCTKTGVKHLHHKAQEFDIGVYFEANGHGTALFSEAVEVKIKRLAQELDDGKGKAARTLASIIDLFNQAAGDAISDMLVIEAILALKGLTVQQWDAIYVDLPNRQLKVKVADRRVISTTDAERQAVTPPGLQEAINDLVKKYTLARAFVRPSGTEDIVRVYAEANSQESADRLAYEVILLVFQLAGGIGERPQPTF

SEQ ID NO: 741 - protein, 377 aa, mus musculus
MCDDEETTALVCDNGSGLVKAGFAGDDAPRAVFPSIVGRPRHQGVMVGMGQKDSYVGDEAQSKRGILTLRYPIEHGIITNWDDMEKIWHHTFYNELRVAPEEHPTLLTEAPLNPKANREKMTQIMFETFNVPAMYVAIQAVLSLYASGRTTGIVLDSGDGVTHNVPIYEGYALPHAIMRLDLAGRDLTDYLMKILTERGYSFVTTAEREIVRDIKEKLCYVALDFENEMATAASSSSLEKSYELPDGQVITIGNERFRCPETLFQPSFIGMESAGIHETTYNSIMKCDIDIRKDLYANNVLSGGTTMYPGIADRMQKEITALAPSTMKIKIIAPPERKYSVWIGGSILASLSTFQQMWISKQEYDEAGPSIVHRKCF

SEQ ID NO: 742 - protein, 187 aa, mus musculus
MAADISQWAGPLCLQEVDEPPQHALRVDYAGVTVDELGKVLTPTQVMNRPSSISWDGLDPGKLYTLVLTDPDAPSRKDRKFREWHHFLVVNMKGNDISSGTVLSDYVGSGPPSGTGLHRYVWLVYEQEQPLSCDEPILSNKSGDNRGKFKVETFRKKYNLGAPVAGTCYQAEWDDYVPKLYEQLSGK

SEQ ID NO: 743 - protein, 418 aa, mus musculus
MAGRLPACVVDCGTGYTKLGYAGNTEPQFIIPSCIAIKESAKVGDQAQRRVMKGVDDLDFFIGDEAIEKPTYATKWPIRHGIVEDWDLMERFMEQVIFKYLRAEPEDHYFLLTEPPLNTPENREYTAEIMFESFNVPGLYIAVQAVLALAASWTSRQVGERTLTGTVIDSGDGVTHVIPVAEGYVIGSCIKHIPIAGRDITYFIQQLLRDREVGIPPEQSLETAKAVKERYSYICPDLVKEFNKYDTDGSKWIKQYTGVNAISKKEFSIDVGYERFLGPEIFFHPEFANPDFTQPISEVVDEVIQNCPIDVRRPLYRNIVLSGGSTMFRDFGRRLQRDLKRTVDARLKLSEELSGGRLKPKPIDVQVITHHMQRYAVWFGGSMLASTPEFYQVCHTKKDYEEIGPSICRHNPVFGVMS

SEQ ID NO: 744 - protein, 245 aa, mus musculus
GELQKAIDLFTDAIKLNPRLAILYAKRASVFVKLQKPNAAIRDCDRAIEINPDSAQPYKWRGKAHRLLGHWEEAAHDLALACKLDYDEDASAMLREVQPRAQKIAEHRRKYERKREEREIKERIERVKKAREEHERAQREEEARRQSGSQYGSFPGGFPGGMPGNFPGGMPGMGGAMPGMAGMAGMPGLNEILSDPEVLAAMQDPEVMVAFQDVAQNPSNMSKYQSNPKVMNLISKLSAKFGGQS

SEQ ID NO: 745 - protein, 435 aa, mus musculus
MIGGLFIYNHKGEVLISRVYRDDIGRNAVDAFRVNVIHARQQVRSPVTNIARTSFFHVKRSNIWLAAVTKQNVNAAMVFEFLYKMCDVMAAYFGKISEENIKNNFVLIYELLDEILDFGYPQNSETGALKTFITQQGIKSQHQTKEEQSQITSQVTGQIGWRREGIKYRRNELFLDVLESVNLLMSPQGQVLSAHVSGRVVMKSYLSGMPECKFGMNDKIVIEKQGKGTADETSKSGKQSIAIDDCTFHQCVRLSKFDSERSISFIPPDEEFELMRYRTTKDIILPFRVIPLVREVGRTKLEVKVVIKSNFKPSLLAQKIEVRIPTPLNTSGVQVICMKGKAKYKASENAIVWKIKRMAGMKESQISAEIELLPTNDKKKWARPPISMNFEVPFAPSGLKVRYLKVFEPKLNYSDHDVIKWVRYIGRSGIYETRC

SEQ ID NO: 746 - protein, 332 aa, mus musculus
MATLKDQLIVDLLKEEQAPQNKITVVGVGAVGMACAISILMKDLADELALVDVMEDKLKGEMMDLQHGSLFLKTPKIVSSKDYCVTANSKLVIITAGARQQEGESRLNLVQRNVNIFKFIIPNIVKYSPHCKLLIVSNPVDILTYVAWKISGFPKNRVIGSGCNLDSARFRYLMGERLGVHALSCHGWVLGEHGDSSVPVWSGVNVAGVSLKSLNPELGTDADKEQWKEVHKQVVDSAYEVIKLKGYTSWAIGLSVADLAESIMKNLRRVHPISTMIKGLYGINEDVFLSVPCILGQNGISDVVKVTLTPEEEARLKKSADTLWGIQKELQF

SEQ ID NO: 747 - protein, 480 aa, mus musculus
MAASAVCRAACSGTQVLLRTRRSPALLRLPALRGTATFAQALQSVPETQVSILDNGLRVASEQSSHATCTVGVWIDAGSRYETEKNNGAGYFLEHLAFKGTKNRPGNALEKEVESIGAHLNAYSTREHTAYLIKALSKDLPKVVELLADIVQNSSLEDSQIEKERDVILREMQENDASMQNVVFDYLHATAFQGTPLAQAVEGPSENVRRLSRTDLTDYLNRHYKAPRMVLAAAGGVEHQQLLDLAQKHLSSVSRVYEEDAVPGLTPCRFTGSEIRHRDDALPLAHVAIAVEGPGWANPDNVTLKVANAIIGHYDCTYGGGVHLSSPLASVAVANKLCQSFQTFNISYSDTGLLGAHFVCDAMSIDDMVFFMQGQWMRLCTSAAESEVTRGKNILRNALVSHLDGTTPVCEDIGRSLLTYGRRIPLAEWESRIQEVDAQMLRDICSKYFYDQCPAVAGYGPIEQLPDYNRIRSGMFWLRF

SEQ ID NO: 748 - protein, 543 aa, mus musculus
MEQVNELKEKGNKALSAGNIDDALQCYSEAIKLDPQNHVLYSNRSAAYAKKGDYQKAYEDGCKTVDLKPDWGKGYSRKAAALEFLNRFEEAKRTYEEGLKHEANNLQLKEGLQNMEARLAERKFMNPFNLPNLYQKLENDPRTRSLLSDPTYRELIEQLQNKPSDLGTKLQDPRVMTTLSVLLGVDLGSMDEEEEAATPPPPPPPKKEPKPEPMEEDLPENKKQALKEKELGNDAYKKKDFDKAMKHYDRAKELDPTNMTYITNQAAVHFEKGDYNKCRELCEKAIEVGRENGEDYRQIAKAYARIGNSYFKEEKYKDAIHFYNKSLAEHRTPDVLKKCQQAEKILKEQERLAYINPDLALEEKNKGNECFQKGDYPQAMKHYTEAIKRNPRDAKLYSNRAACYTKLLEFQLALKDCEECIQLEPTFIKGYTRKAAALEAMKDYTKAMDVYQKALDLDSSCKEAADGYQRCMMAQYNRHDSPEDVKRRAMADPEVQQIMSDPAMRLILEQMQKDPQALSEHLKNPVIAQKIQKLMDVGLIAIR

SEQ ID NO: 749 - protein, 357 aa, mus musculus
MFSSVAHLARANPFNAPHLQLVHDGLSGPRSPPAPPRRSHHLAAAAVEEYSCEFGSMKYYALCGFGGVLSCGLTHTAVVPLDLVKCRMQVDPQKYKGIFNGFSITLKEDGVRGLAKGWAPTLIGYSMQGLCKFGFYEVFKALYSNILGEENTYLWRTSLYLASSASAEFFADIALAPMEAAKVRIQTQPGYANTLREAVPKMYKEEGLNAFYKGVAPLWMRQIPYTMMKFACFERTVEALYKFVVPKPRSECTKAEQLVVTFVAGYIAGVFCAIVSHPADSVVSVLNKEKGSTASQVLQRLGFRGVWKGLFARIIMIGTLTALQWFIYDSVKVYFRLPRPPPPEMPESLKKKLGLTE

SEQ ID NO: 750 - protein, 531 aa, mus musculus
MAAVKTLNPKAEVARAQAALAVNISAARGLQDVLRTNLGPKGTMKMLVSGAGDIKLTKDGNVLLHEMQIQHPTASLIAKVATAQDDITGDGTTSNVLIIGELLKQADLYISEGLHPRIITEGFEAAKEKALQFLEQVKVSKEMDRETLIDVARTSLRTKVHAELADVLTEAVVDSILAIRKKDEPIDLFMVEIMEMKHKSETDTSLIRGLVLDHGARHPDMKKRVENAYILTCNVSLEYEKTEVNSGFFYKSAEEREKLVKAERKFIEDRVKKIIELKKKVCGDSDKGFVVINQKGIDPFSLDALAKEGIVALRRAKRRNMERLTLACGGIALNSFDDLNPDCLGHAGLVYEYTLGEEKFTFIEKCNNPRSVTLLVKGPNKHTLTQIKDAIRDGLRAVKNAIDDGCVVPGAGAVEVALAEALIKYKPSVKGRAQLGVQAFADALLIIPKVLAQNSGFDLQETLVKVQAEHSESGQLVGVDLSTGEPMVAAEMGVWDNYCVKKQLLHSCTVIATNILLVDEIMRAGMSSLKG

SEQ ID NO: 751 - protein, 283 aa, mus musculus
MAVPPTYADLGKSARDVFTKGYGFGLIKLDLKTKSENGLEFTSSGSANTETTKVNGSLETKYRWTEYGLTFTEKWNTDNTLGTEITVEDQLARGLKLTFDSSFSPNTGKKNAKIKTGYKREHINLGCDVDFDIAGPSIRGALVLGYEGWLAGYQMNFETSKSRVTQSNFAVGYKTDEFQLHTNVNDGTEFGGSIYQKVNKKLETAVNLAWTAGNSNTRFGIAAKYQVDHDACFSAKVNNSSLIGLGYTQTLKPGIKLTLSALLDGKNVNAGGHKLGLGLEFQA

SEQ ID NO: 752 - protein, 539 aa, mus musculus
MPENVASRSGAPTAGPGSRGKSAYQDRDKPAQIRFSNISAAKAVADAIRTSLGPKGMDKMIQDGKGDVTITNDGATILKQMQVLHPAARMLVELSKAQDIEAGDGTTSVVIIAGSLLDSCTKLLQKGIHPTIISESFQKALEKGLEILTDMSRPVQLSDRETLLNSATTSLNSKVVSQYSSLLSPMSVNAVMKVIDPATATSVDLRDIKIVKKLGGTIDDCELVEGLVLTQKVANSGITRVEKAKIGLIQFCLSAPKTDMDNQIVVSDYAQMDRVLREERAYILNLVKQIKKTGCNVLLIQKSMLRDALSDLALHFLNKMKIMVVKDVEREDIEFICKTIGTKPVAHIDQFTADMLGSAELAEEVSLNGSGKLFKITGCTSPGKTVTIVVRGSNKLVIEEAERSIHDALCVIRCLVKKRALIAGGGAPEIELALRLTEYSRTLSGMESYCVRAFADAMEVIPSTLAENAGLNPISTVTELRNRHAQGEKTTGINVRKGGISNILEEMVVQPLLVSVSALTLATETVRSILKIDDVVNTR

SEQ ID NO: 753 - protein, 406 aa, mus musculus
MAAAVRQDLAQLMNSSGSHKDLAGKYRQILEKAIQLSGTEQLEALKAFVEAMVNENVSLVISRQLLTDFCTHLPNLPDSTAKEVYHFTLEKIQPRVISFEEQVASIRQHLASIYEKEEDWRNAAEVLVGIPLETGQKQYNVDYKLETYLKIARLYLEDDDPVQAEAYINRASLLQNESTNEQLQIHYKVCYARVLDYRRKFIEAAQRYNELSYKTIVHESERLEALKHALHCTILASAGQQRSRMLATLFKDERCQQLAAYGILEKMYLDRIIRGNQLQEFAAMLMPHQKATTADGSSILDRAVIEHNLLSASKLYNNITFEELGALLEIPAAKAEKIASQMITEGRMNGFIDQIDGIVHFETREALPTWDKQIQSLCFQVNNLLEKISQTAPEWTAQAMEAQMAQ

SEQ ID NO: 754 - protein, 726 aa, mus musculus
MLRIPIKRALIGLSNSPKGYVRTTGTAASNLIEVFVDGQSVMVEPGTTVLQACEKVGMQIPRFCYHERLSVAGNCRMCLVEIEKAPKVVAACAMPVMKGWNILTNSEKSKKAREGVMEFLLANHPLDCPICDQGGECDLQDQSMMFGSDRSRFLEGKRAVEDKNIGPLVKTIMTRCIQCTRCIRFASEIAGVDDLGTTGRGNDMQVGTYIEKMFMSELSGNVIDICPVGALTSKPYAFTARPWETRKTESIDVMDAVGSNIVVSTRTGEVMRILPRMHEDINEEWISDKTRFAYDGLKRQRLTEPMVRNEKGLLTYTSWEDALSRVAGMLQNFEGNAVAAIAGGLVDAEALVALKDLLNKVDSDNLCTEEIFPTEGAGTDLRSNYLLNTTIAGVEEADVVLLVGTNPRFEAPLFNARIRKSWLHNDLKVALIGSPVDLTYRYDHLGDSPKILQDIASGRHSFCEVLKDAKKPMVVLGSSALQRDDGAAILVAVSNMVQKIRVTTGVAAEWKVMNILHRIASQVAALDLGYKPGVEAIRKNPPKMLFLLGADGGCITRQDLPKDCFIVYQGHHGDVGAPMADVILPGAAYTEKSATYVNTEGRAQQTKVAVTPPGLAREDWKIIRALSEIAGITLPYDTLDQVRNRLEEVSPNLVRYDDIEETYFQQASELAKLVNQEVLADPLVPPQLTIKDFYMTDSISRASQTMAKCVKAVTEGAQAVEEPSIC

SEQ ID NO: 755 - protein, 445 aa, mus musculus
MNEEYDVIVLGTGLTECILSGIMSVNGKKVLHMDQNPYYGGESASITPLEDLYKRFKLPGQPPASMGRGRDWNVDLIPKFLMANGQLVKVLLFTEVTRYMDFKVIEGSFVYKGGKIYKVPSTEAEALASSLMGLFEKRRFRKFLVYVANFDEKDPRTFEGVDPKKTSMRDVYKKFDWGQDVIDFTGHSLALYRTDDYLDQPCCETINRIKLYSESLARYGKSPYLYPLYGLGELPQGFARLSAIYGGTYMLNKPIEEIIVQNGKVVGVKSEGEIARCKQLICDPSYVKDRVEKVSQVIRVICILSHPIKNTNDANSCQIIIPQNQVNRKSDIYVCMISFAHNVAAQGKYIAIVSTTVETKEPEKEIRPALELLEPIEQKFVSISDLFVPKDLGTDSQIFISRAYDATTHFETTCDDIKDIYKRMTGSEFDFEEMKRKKNDIYGED

SEQ ID NO: 756 - protein, 706 aa, mus musculus
MACELRAVLLWGRGLQTVLRAPALAGVRRGKPVLHLQKTTVQFRGPTQSLASGISAGQLYSTQAAEDKEEESLHSVISNTEAVRGSVSKHEFQAETKKLLDIVARSLYSEKEVFIRELISNASDALEKLRHKLVCEGQVLPEMEIHLQTDAKKGTITIQDTGIGMTQEELVSNLGTIARSGSKAFLEALQNQAETSSKIIGQFGVGFYSAFMVADKVEVYSRSAAPESPGYQWLSDGSGVFEIAEASGVRPGTKIIIHLKSDCKDFASESRVQDVVTKYSNFVSFPLYLNGKRINTLQAIWMMDPKDISEFQHEEFYRYIAQAYDKPRFTLHYKTDAPLNIRSIFYVPEMKPSMFDVSRELGSSVALYSRKVLIQTKAADILPKWLRFIRGVVDSEDIPLNLSRELLQESALIRKLRDVLQQRLIKFFIDQSKKDAEKYAKFFEDYGLFMREGIVTTAEQDIKEDIAKLLRYESSALPAGQLTSLPDYASRMQAGTRNIYYLCAPNRHLAEHSPYYEAMKQKHTEVLFCYEQFDELTLLHLREFDKKKLISVETDIVVDHYKEEKFEDTSPADERLSEKETEDLMAWMRNALGSRVTNVKVTFRLDTHPAMVTVLEMGAARHFLRMQQLAKTQEERAQLLQPTLEINPRHTLIKKLCQLRESEPELAQLLVDQIYENAMIAAGLVDDPRAMVGRLNDLLVKVLEKH

SEQ ID NO: 757 - protein, 270 aa, mus musculus
MEAVPEKKKKVATVPGTLKKKVPAGPKTLKKKVPAVPETLKKKRRNFAELKVKRLRKKFALKTLRKARRKLIYEKAKHYHKEYRQMYRTEIRMARMARKAGNFYVPAEPKLAFVIRIRGINGVSPKVRKVLQLLRLRQIFNGTFVKLNKASINMLRIVEPYIAWGYPNLKSVNELIYKRGYGKINKKRIALADNSLIARSLGKFGIICMEDLIHEIYTVGKRFKEANNFLWPFKLSSPRGGMKKKTTHFVEGGDAGNREDQINRLIRRMN

SEQ ID NO: 758 - protein, 249 aa, mus musculus
MSRRYDSRTTIFSPEGRLYQVEYAMEAIGHAGTCLGILANDGVLLAAERRNIHKLLDEVFFSEKIYKLNEDMACSVAGITSDANVLTNELRLIAQRYLLQYQEPIPCEQSVTALCDIKQAYTQFGGKRPFGVSLLYIGWDKHYGFQLYQSDPSGNYGGWKATCIGNNSAAAVSMLKQDYKEGEMTLKSALALAVKVLNKTMDVSKLSAEKVEIATLTRESGKTVIRVLKQKEVEQLIKKHEEEEAKAER

SEQ ID NO: 759 - protein, 607 aa, mus musculus
MDNLSDTLKKLKITAADRTEGSLEGCLDCLLQALAQNNAETSEKIQGSGILQLFANLLTPQASCTAKVANIIAEVAKNEFMRIPCVDAGLISPLVQLLNSKDQEVLLQTGRALGNICYDSHEGRSAVDQAGGAQIVIDHLRSLCGRTDPASEKLMTVFCGMLMNYSNENDSLQAQLISMGVIPTLVRLLGIHCHNAALTEMCLVAFGNLAELESSKEQFASTNIAEELVKLFKKQIEHDKREMIFEVLAPLAEHDAIKLQLVEAGLVECLLEIVQQKVDSNKEDDVAELKTASDLMVLLLLGDESMQKLFEGGKGSVFQRVLSWIPSNNHQLQLAGALAIANFARNDGNCIHMVDNGIVEKLMDLLDRHVEDGNVTVQHAALSALRNLAIPVVNKAKMLSAGVTETVLKFLKSEMPPVQFKLLGTLRMLIDAQAEAAEQLGKNAKLVERLVEWCEAKDHAGVMGESNRLLSALIRHSKSKDVIKTIVQSGGIKHLVTMATSEHVIMQNEALVALALIAALELGPAEKDLASAQLVQILHRLLADERSAPEIKYNSMVLICALMGSESLYKEVQDLAFLDVVSKLRSHENKSVAQQASLTEQRLTVES

SEQ ID NO: 760 - protein, 549 aa, mus musculus
MSESLGDTLNLSGDVSNSPQALLDLARDRPKSSPNDVQNRDTPMDISASSSSSCSANPQSRQSEFKLDKVPWLTITDSSARKEKSLPQLANPGSAQIQGQIPQVGVYNRPCLHRLKYFLRPPVHHLFFQTLIPDKDTRESKGQKLEPIPHRRLRMVTNTIEENFPLGTVQFLMDFVSPQHYPPREIVAHIVQKILLSGSETVDVLKEAYMLLMKIQQLHPANAKTVEWDWKLLTYVMEEEGQTLPGRVLFLRYVVQTLEDDFQQILRRQRQHLQQSIANTVLSCDKQPHNVRDVIKWLVKAVTENELTPPQDETQTSPRTGVLKTSSDHLSPRPNQNKNTNQLIVCQLQRMLSIAVEVDRTPTCSSNKIAEMMFGFVLDIPERSQREMFFTTMESHLLRCKVLEIIFLHSCETPTRLPLSLAQTLYFLNNSTSLLKCQSDKTQWQTWDELVEHLQFLLSSYQHVLREHLRSSVIDRKDLIIKRIKPKPQQGDDITVLDVEKQIEAFRSRLVHILGEPLVPQLQDKVHLLKLLLFYAADLNPDTEPASEH

SEQ ID NO: 761 - protein, 219 aa, mus musculus
SVTSLSPSLQVFLLAGRKRKRSKTANYLISSDPTNLSRGGENFIGKLRSNLLGNRFTVFDNGQNPQRGGGGDVGSLRQELAAVVYETNVLGFRGPRRMTVIIPGMNSDNERVPIRPRNASDGLLVRWQNKTLESLIELHNKPPIWNEDSGSYTLNFQGRVTQASVKNFQIVHADDPDYIVLQFGRVAEDAFTLDYRYPLCALQAFAIALSSFDGKLACE

SEQ ID NO: 762 - protein, 586 aa, mus musculus
MSAAEEVDGLGVVRPHYGSVLDNERLTAEEMDERRRQNVAYEYLCHLEEAKRWMEACLGEDLPPTTELEEGLRNGVYLAKLGNFFSPKVVSLKKIYDREQTRYKATGLHFRHTDNVIQWLNAMDEIGLPKIFYPETTDIYDRKNMPRCIYCIHALSLYLFKLGLAPQIQDLYGKVDFTEEEINNMKIELEKYGIQMPAFSKIGGILANELSVDEAALHAAVIAINEAIDRRVAADTFTALKNPNAMLVNLEEGLAPTYQDVLYQAKQDKMTNAKNRTENSDRERDVYEELLTQAEIQGNVNKVNTSSALANISLALEQGCAVTLLKALQSLALGLRGLQTQNSDWYMKQLQSDLQQKRQSGQTDPLQKEEVQAGVDAANSAAQQYQRRLAAVAAINAAIQKGIAEKTVLELMNPEAQLPQVYPFAADLYQKELATLQQQSPEHSLTHPELTVAVEMLSSVALINRALESGDMTTVWKQLSSSVTGLTNIEEENCQRYLDELMKLKAQAHAENNAFITWNDIQACVDHVNLVVHEEHERILAIGLINEALDEGDAQKTLQALQIPAAKLEGVLAEVAQHYQDTLIRA

SEQ ID NO: 763 - protein, 650 aa, mus musculus
MSRQNLVALTVTTLLGVAMGGFVLWKGIQRRWSKTSRVMQQQPQQPQQPQQPQPQPQPQPQPQPEHPQPQQQVPGGREWPPPEDDQLPFGALRAPRASWEERILQAEVVTVSQEAEWNQIQPFLKRELEDFPVLGIDCEWVNLEGKASPLSLLQMASPSGFCALVRLPRLIYGGRTLPRTLLDILADGAILKVGVGCSEDANKLLQDYGLIVRGCLDLRYLAMKQGNNILCNGLSLKSLAETILNFPLDKSLLLRCNNWDAENLTEDQVTYAARDAQISVALFLHLLGYPFSRDSYEEESTDQINWQKALERCRNMVDIPFRSKGLGRLVEEVNGEALESQLKPRNRKAKTDRMVPGNNQGRDPRKHKRKPLGVGYSARKSPLYDNCFLRAPDGQPLCTCDRRKAQWYLDKGIGELVSKEPFVVRLQFEPAGRPESPGDYYLMVKENLCVVCGKTDTYIRKNIIPHEYRKHFPIEMKDHNSHDVLLLCTSCHAISNYYDNHLKQQLAKEFQAPIGSEEGLRLLEDLERRQVRSGARALLNAESLPAHRKEELLHALREFYNTDIITEEMLHEAASLETRIYNESYIPHGLKVVQRHTEGGLRSLMQLESRWRQHFLDSMQPKHLPQQWSVDHNHQKLLRKYGDDLPIKLS

SEQ ID NO: 764 - protein, 357 aa, mus musculus
KAVEALKEAGSIVRLYVKRRKPASEKIMEIKLIKGPKGLGFSIAGGVGNQHIPGDNSIYVTKIIEGGAAHKDGKLQIGDKLLAVNSVCLEEVTHEEAVTALKNTSDFVYLKVAKPTTSSQSVDNYVSPSSCLGQTPTSPARYSPISKAVLGDDEITREPRKVVLHRGSTGLGFNIVGGEDGEGIFISFILAGGPADLSGELRKGDRIISVNSVDLRAASHEQAAAALKNAGQAVTIVAQYRPEEYSRFEAKIHDLREQMMNSSVSSGSGSLRTSQKRSLYVRALFDYDKTKDSGLPSQGLNFRFGDILHVINASDDEWWQARQVTPDGESDEVGVIPSKRRVEKKERARLKTVKFNS

SEQ ID NO: 765 - protein, 421 aa, mus musculus
MVSASRPEALAAPVTTVATLVPHNATEPASPGEGKEDAFSKLKQKFMNELHKIPLPPWALIAIAIVAVLLVVTCCFCVCKKCLFKKKNKKKGKEKGGKNAINMKDVKDLGKTMKDQALKDDDAETGLTDGEEKEEPKEEEKLGKLQYSLDYDFQNNQLLVGIIQAAELPALDMGGTSDPYVKVFLLPDKKKKFETKVHRKTLNPVFNEQFTFKVPYSELGGKTLVMAVYDFDRFSKHDIIGEFKVPMNTVDFGHVTEEWRDLQSAEKEEQEKLGDICFSLRYVPTAGKLTVVILEAKNMKKMDVGGLSDPYVKIHLMQNGKRLKKKKTTIKKNTLNPYYNESFSFEVPFEQIQKVQVVVTVLDYDKIGKNDAIGKVFVGYNSTGAELRHWSDMLANPRRPIAQWHTLQVEEEVDAMLAVKK

SEQ ID NO: 766 - protein, 340 aa, mus musculus [sequence omitted]

SEQ ID NO: 767 - protein, 424 aa, mus musculus
MAALVALHGVVRRPLLRGLLQEVRCLERSYASKPTLNEVVIVSAIRTPIGSFLGSLASQPATKLGTAAIQGAIEKAGIPKEEVKEVYMGNVIQGGEGQAPTRQATLGAGLPISTPCTTVNKVCASGMKAIMMASQSLMCGHQDVMVAGGMESMSNVPYVMSRGATPYGGVKLEDLIVKDGLTDVYNKIHMGNCAENTAKKMNISRQEQDTYALSSYTRSKEAWDAGKFASEITPITISVKGKPDVVVKEDEEYKRVDFSKVPKLKTVFQKENGTITAANASTLNDGAAALVLMTAEAAQRLNVNPLARIAAFADAAVDPIDFPLAPAYAVPKVLKYAGLKKEDIAMWEVNEAFSVVVLANIKMLEIDPQKVNIHGGAVSLGHPIGMSGARIVVHMAHALKPGEFGLASICNGGGGASALLIEKL

SEQ ID NO: 768 - protein, 542 aa, mus musculus
MFRRILQRTPGRVGSQGSDLDSSATPINTVDVNNESSSEGFICPQCMKSLGSADELFKHYQAVHDAGNDSGHGGEAGLALTRDDITLLRQEVQDLQASLKEEKWYSEELKKELEKYQGLQQQEAKSDGLVTDSSAELQALEQQLEEAQTENFNIKQMKDLFEQKAAQLATEIADIKSKYDEEKSLRAAAEQKVTHLTEDLNKQTTVIQDLKTELLQRPGIEDVAVLKKELVQVQTLMDNMTLERERESEKLKDECKKLQSEHAHLEATINQLRSELAKGPQEVAVYVQEIQKLKGSINELTQKNQNLTEKLQKKDLDYTHLEEKHNEESASRKTLQASLHQRDLDCQQLQARLTASESSLQRAQGELSEKAEAAQKLREELREVESTRQHLKVEVKQLQQQREEKEQHGLQLQGEVSQLHCKLLETERQLGEAHGRLKEQRQLSSEKLMEKEQQVADLQLKLSRLEEQLKEKVTNSTELQHQLEKSKQQHQEQQALQQSATAKLREAQNDLEQVLRQIGDKDQKIQNLEALLQKGKESVSLP

SEQ ID NO: 769 - protein, 418 aa, mus musculus
MADGGSERADGRIVKMEVDYSATVDQRLPECEKLAKEGRLQEVIETLLSLEKQTRTASDMVSTSRILVAVVKMCYEAKEWDLLNENIMLLSKRRSQLKQAVAKMVQQCCTYVEEITDLPVKLRLIDTLRMVTEGKIYVEIERARLTKTLATIKEQNGDVKEAASILQELQVETYGSMEKKERVEFILEQMRLCLAVKDYIRTQIISKKINTKFFQEENTENLKLKYYNLMIQLDQHEGSYLSICKHYRAIYDTPCIQAESDKWQQALKSVVLYVILAPFDNEQSDLVHRISSDKKLEEIPKYKDLLKLFTTMELMRWSTLVEDYGVELRKGSSETPATDVFSSTEEGEKRWKDLKSRVVEHNIRIMAKYYTRITMKRMAQLLDLSVDVWTTQARPRRISLGAVSISASASREIGLELV

SEQ ID NO: 770 - protein, 1077 aa, mus musculus
MARLFSPRPPPSEDLFYETYYSLSQQYPLLILLLVIVLCALVALPAVAWASGRELTSDPSFLTTVLCALGGFSLLLGLASREQQLQRWTRPLSGLIWVALLALGYGFLFTGGVVSAWDQVSFFLFIIFTVYAMLPLGMRDAAAAGVISSLSHLLVLGLYLGWQPESQRALLPQLAANAVLFLCGNVVGAYHKALMERALRATFREALSSLHSRRRLDTEKKHQEHLLLSILPAYLAREMKAEIMARLQAGQRSRPENTNNFHSLYVKRHQGVSVLYADIVGFTRLASECSPKELVLMLNELFGKFDQIAKEHECMRIKILGDCYYCVSGLPLSLPDHAINCVRMGLDMCRAIRKLRVATGVDINMRVGVHSGSVLCGVIGLQKWQYDVWSHDVTLANHMEAGGVPGRVHITGATLALLAGAYAVERADTEHRDPYLRELGEPTYLVIDPRAEEEDEKGTAKGLLSSLEGHTMRPSLLMTRYLESWGAAKPFAHLSHLDSPVSTSTPLPEKAFSPQWSLDRSRTPRGLDDELGTGDAKFFQVIEQLNSQKQWKQSKDFNLLTLYFREKEMEKQYRLSALPAFKYYAACTFLVFLSNFTIQMLVTTRPPALIITYSITFLLFFLLLFVCFSEHLTKCVQKGPKMLHWLPALSVLVATRPGFRVALGTATILLVFTMAIASLLFLPVSSDCLFLASNVSSVTFNASWEMPGSLPLISIPLISIPYSMHCCVLGFLSCSLFLHMSFELKLLLLLLWLVASCSLFLHSHAWLSDCLIARLYQSPSDSRPGVLKEPKLMGAIYFFIFFFTLLVLARQNEYYCRLDFLWKKKLRQEREETETMENLTRLLLENVLPAHVAPQFIGQNRRNEDLYHQSYECVCVLFASVPDFKEFYSESNINHEGLECLRLLNEIIADFDELLSKPKFSGVEKIKTIGSTYMAATGLNATSGQDTQQDSERSCSHLGTMVEFAVALGSKLGVINKHSFNNFRLRVGLNHRPVVAGVIGAQKPQYDIWGNTVNVASRMESTGVLGKIQVTEETARALQSLGYTCYSRGSIKVKGKGELCTYFLNTDLTRTGSPSAS

SEQ ID NO: 771 - protein, 326 aa, mus musculus
MSWIADTYASTIGHYDINAHACVTGKPISQGGIHGRISATGRGVFHGIENFINEASYMSILGMTPGFGDKTFVVQGFGNVGLHSMRYLHRFGAKCVGVGESDGSIWNPDGIDPKELEDFKLQHGSILGFPKAKVYEGSILEADCDILIPAASEKQLTKSNAPRVKAKIIAEGANGPTTPEADKIFLERNIMVIPDLYLNAGGVTVSYFEWLKNLNHVSYGRLTFKYERDSNYHLLMSVQESLERKFGKHGGTIPVVPTAEFQDRISGASEKDIVHSGLAYTMERSARQIMRTAMKYNLGLDLRTAAYVNAIEKVFKVYNEAGVTFT

SEQ ID NO: 772 - protein, 568 aa, mus musculus
MYSPSRNKIRQSDRLLIKGGRIVNDDQSFYADIYMEDGLIKQIGDNLIVPGGVKTIEANGKMVIPGGIDVHTHFQMPYKGMTTVDDFFQGTKAALAGGTTMIIDHVVPEPESSLTEAYEKWREWADGKSCCDYALHVDITHWNDSVKQEVQSLSKEKGVNSFMVYMAYKDLYQVSNTELYEIFTCLGELGAIAQVHAENGDIIAQEQARMLEMGITGPEGHVLSRPEELEAEAVFRAITVASQTNCPLYVTKVMSKSAADLISQARKKGNVVFGEPITASLGIDGTHYWSKNWAKAAAFVTSPPLSPDPTTPDYINSLLASGDLQLSGSAHCTFSTAQKAIGKDNFTAIPEGTNGVEERMSVIWDKAVATGKMDENQFVAVTSTNAAKIFNLYPRKGRIAVGSDSDLVIWDPDALKIVSAKNHQSVAEYNIFEGMELRGAPLVVICQGKIMLEDGNLHVTQGAGRFIPCSPFSDYVYKRIKARRKMADLHAVPRGMYDGPVFDLTTTPKGGTPAGSTRGSPTRPNPPVRNLHQSGFSLSGTQVDEGVRSASKRIVAPPGGRSNITSLS

SEQ ID NO: 773 - protein, 556 aa, mus musculus
ELYMMSEEKAKDEQSAVSMLKKHQILEQAVEDYAETVHQLSKTSRALVADSHPESERISMRQSKVDKLYAGLKDLAEERRGKLDERHRLFQLNREVDDLEQWIAEREVVAGSHELGQDYEHVTMLQERFREFARDTGNIGQERVDTVNNMADELINSGHSDAATIAEWKDGLNEAWADLLELIDTRTQILAASYELHKFYHDAKEIFGRIQDKHKKLPEELGRDQNTVETLQRMHTTFEHDIQALGTQVRQLQEDAARLQAAYAGDKADDIQKRENEVLEAWKSLLDACEGRRVRLVDTGDKFRFFSMVRDLMLWMEDVIRQIEAQEKPRDVSSVELLMNNHQGIKAEIDARNDSFTACIELGKSLLARKHYASEEIKEKLLQLTEKRKEMIDKWEDRWEWLRLILEVHQFSRDASVAEAWLLGQEPYLSSREIGQSVDEVEKLIKRHEAFEKSAATWDERFSALERLTTLELLEVRRQQEEEERKRRPPSPDPNTKVSEEAESQQWDTSKGDQVSQNGLPAEQGSPRVSYRSQTYQNYKNFNSRRTASDHSWSGM

SEQ ID NO: 774 - protein, 791 aa, mus musculus
MQAGPVQAVPPPPPVATESKQPIEEEASSKEDPTPSKPVVGIIYPPPEVRNIVDKTASFVARNGPEFEARIRQNEINNPKFNFLNPNDPYHAYYRHKVSEFKEGKAQEPSAAIPKVMQQQQQATQQQLPQKVQAQVIQETIVPKEPPPEFEFIADPPSISAFDLDVVKLTTQFVARNGRQFLTQLMQKEQRNYQFDFLRPQHSLFNYFTKLVEQYTKILIPPKGLFSKLKKEAENPREVLDQVCYRVEWAKFQERERKKEEEEKEKERVAYAQIDWHDFVVVETVDFQPNEQGNFPPPTTPEELGARILIQERYEKFGESEEVEMEVESDEEDQEKAEETPSQLDQDTQVQDMDEGSDDEEEGQKVPPPPETPMPPPLPPTPDQVIVRKDYDPKASKPLPPAPAPDEYLVSPITGEKIPASKMQEHMRIGLLDPRWLEQRDRSIREKQSDDEVYAPGLDIESSLKQLAERRTDIFGVEETAIGKKIGEEEIQKPEEKVTWDGHSGSMARTQQAAQANITLQEQIEAIHKAKGLVPEDDTKEKIGPSKPNEIPQQPPPPSSATNIPSSAPPITSVPRPPAMPPPVRTTVVSAVPVMPRPPMASVVRLPPGSVIAPMPPIIHAPRINVVPMPPAAPPIMAPRPPPMIVPTAFVPAPPVAPVPAPAPMPPVHPPPPMEDEPPSKKLKTEDSLMPEEEFLRRNKGPVSIKVQVPNMQDKTEWELNGQGLVFTLPLTDQVSVIKVKIHEATGMPAGKQKLQYEGIFIKDSNSLAYYNMASGAVIHLALKERGGRKK

SEQ ID NO: 775 - protein, 1249 aa, mus musculus
MATAATEEPFPFHGLLPKKETGASSFLCRYPEYDGRGVLIAVLDTGVDPGAPGMQVTTDGEPKIIDIIDTTGSGDVNTATEVEPKDGEIIGLSGRVLKIPANWTNPLGKYHIGIKNGYDFYPKALKERIQKERKEKIWDPIHRVALAEACRKQEEFDIANNGSSQANKLIKEELQSQVELLNSFEKKYSDPGPVYDCLVWHDGETWRACVDSNENGDLSKCAVLRNYKEAQEYSSFGTAEMLNYSVNIYDDGNLLSIVTSGGAHGTHVASIAAGHFPEEPERNGVAPGAQILSIKIGDTRLSTMETGTGLIRAMIEVINHKCDLVNYSYGEATHWPNSGRICEVINEAVWKHNTIYVSSAGNNGPCLSTVGCPGGTTSSVIGVGAYVSPDMMVAEYSLREKLPANQYTWSSRGPSADGALGVSISAPGGAIASVPNWTLRGTQLMNGTSMSSPNACGGIALVLSGLKANNVDYTVHSVRRALENTAIKADNIEVFAQGHGIIQVDKAYDYLIQNTSFANRLGFTVTVGNNRGIYLRDPVQVAAPSDHGVGIEPVFPENTENSEKISFQLHLALTSNSSWVQCPSHLELMNQCRHINIRVDPRGLREGLHYTEVCGYDIASPNAGPLFRVPITAVIAAKVNESSHYDLAFTDVHFKPGQIRRHFVEVPEGATWAEVTVCSCSSEVSAKFVLHAVQLVKQRAYRSHEFYKFCSLPEKGTLIEAFPVLGGKAIEFCIARWWASLSDVNIDYTISFHGIVCTAPQLNIHASEGINRFDVQSSLKYEDLAPCITLKSWVQTLRPVNAKTRPLGSRDVLPNNRQLYEMVLTYSFHQPKSGEVTPSCPLLCELLYESEFDSQLWIIFDQNKRQMGSGDAYPHQYSLKLEKGDYTIRLQIRHEQISDLDRLKDLPFIVSHRLSNTLSLDIHENHSLALLGKKKSSSLTLPPKYNQPFFVTSLPDDKIPKGAGPGCYLAGSLTLSKTELGKKADVIPVHYYLIPPPTKIKNGSKDKEKDSEKEKDLKEEFTEALRDLKIQWMTKLDSTDIYNELKETYPAYLPLYVARLHQLDAEKERMKRLNEIVDAANAVISHIDQTALAVYIAMKTDPRPDAATIKNDMDKQKSTLIDALCRKGCALADHLLHTQPHDGAAAGDAEAKEEEGESTMESLSETYWETTKWTDLFDTKVLIFAYKHALVNKMYGRGLKFATKLVEEKPTKENWKNCIQLMKLLGWTHCASFTENWLPIMYPPDYCVF

SEQ ID NO: 776 - protein, 591 aa, mus musculus
  misc_feature (112)..(112): Xaa can be any naturally occurring amino acid
MEGKWLLCLLLVLGTAAVEAHDGHDDDAIDIEDDLDDVIEEVEDSKSKSDASTPPSPKVTYKAPVPTGEVYFADSFDRGSLSGWILSKAKKDDTDDEIAKYDGKWEVDEMKXTKLPGDKGLVLMSRAKHHAISAKLNKPFLFDTKPLIVQYEVNFQNGIECGGAYVKLLSKTAELSLDQFHDKTPYTIMFGPDKCGEDYKLHFIFRHKNPKTGVYEEKHAKRPDADLKTYFTDKKTHLYTLILNPDNSFEILVDQSVVNSGNLLNDMTPPVNPSREIEDPEDRKPEDWDERPKIADPDAVKPDDWDEDAPSKIPDEEATKPEGWLDDEPEYIPDPDAEKPEDWDEDMDGEWEAPQIANPKCESAPGCGVWQRPMIDNPNYKGKWKPPMIDNPNYQGIWKPRKIPNPDFFEDLEPFKMTPFSAIGLELWSMTSDIFFDNFIISGDRRVVDDWANDGWGLKKAADGAAEPGVVLQMLEAAEERPWLWVVYILTVALPVFLVILFCCSGKKQSNAMEYKKTDAPQPDVKDEEGKEEEKNKRDEEEEEEKLEEKQKSDAEEDGVTGSQDEEDSKPKAEEDEILNRSPRNRKPRRE

SEQ ID NO: 777 - protein, 374 aa, mus musculus
MGVVHRDLKPENLLLASKCKGAAVKLADFGLAIEVQGDQQAWFGFAGTPGYLSPEVLRKEAYGKPVDIWACGVILYILLVGYPPFWDEDQHKLYQQIKAGAYDFPSPEWDTVTPEAKNLINQMLTINPAKRITAHEALKHPWVCQRSTVASMMHRQETVECLKKFNARRKLKGAILTTMLATRNFSAAKSLLNKKADGVKPQTNSTKNSSAITSPKGSLPPAALESSDSTNTTIEDEDAKARKQEIIKTTEQLIEAVNNGDFEAYAKICDPGLTSFEPEALGNLVEGMDFHRFYFENLLAKNSKPIHTTILNPHVHVIGEDAACIAYIRLTQYIDGQGRPRTSQSEETRVWHRRDGKWQNVHFHCSGAPVAPLQ

SEQ ID NO: 778 - protein, 400 aa, mus musculus
MSSSGAKEKPELQFPFLQDEDTVATLHECKTLFILRGLPGSGKSTLARLILEKYHDGTKMVSADAYKIIPGSRADFSEAYKRLDEDLAGYCRRDIRVLVLDDTNHERERLDQLFEMADQYQYQVVLVEPKTAWRLDCAQLKEKNQWQLSADDLKKLKPGLEKDFLPLYFGWFLTKKSSETLRKAGQVFLEELGNHKAFKKELRHFISGDEPKEKLELVSYFGKRPPGVLHCTTKFCDYGKAAGAEEYAQQEVVKRSYGKAFKLSISALFVTPKTAGAQVVLTDQELQLWPSDLDKPSASEGLPPGSRAHVTLGCAADVQPVQTGLDLLDILQQVKGGSQGEAVGELPRGKLYSLGKGRWMLSLTKKMEVKAIFTGYYGKGKPVPIHGSRKGGAMQICTII

SEQ ID NO: 779 - protein, 420 aa, mus musculus
MNTSFTRKSHTFLPKLFFRKMSSSGAKEKPELQFPFLQDEDTVATLHECKTLFILRGLPGSGKSTLARLILEKYHDGTKMVSADAYKIIPGSRADFSEAYKRLDEDLAGYCRRDIRVLVLDDTNHERERLDQLFEMADQYQYQVVLVEPKTAWRLDCAQLKEKNQWQLSADDLKKLKPGLEKDFLPLYFGWFLTKKSSETLRKAGQVFLEELGNHKAFKKELRHFISGDEPKEKLELVSYFGKRPPGVLHCTTKFCDYGKAAGAEEYAQQEVVKRSYGKAFKLSISALFVTPKTAGAQVVLTDQELQLWPSDLDKPSASEGLPPGSRAHVTLGCAADVQPVQTGLDLLDILQQVKGGSQGEAVGELPRGKLYSLGKGRWMLSLTKKMEVKAIFTGYYGKGKPVPIHGSRKGGAMQICTII

SEQ ID NO: 780 - protein, 642 aa, mus musculus
MELQRTSSISGPLSPAYTGQVPYNYNQLEGRFKQLQDEREAVQKKTFTKWVNSHLARVSCRITDLYTDLRDGRMLIKLLEVLSGERLPKPTKGRMRIHCLENVDKALQFLKEQRVHLENMGSHDIVDGNHRLTLGLIWTIILRFQIQDISVETEDNKEKKSAKDALLLWCQMKTAGYPNVNIHNFTTSWRDGMAFNALIHKHRPDLIDFDKLKKSNAHYNLQNAFNLAEQHLGLTKLLDPEDISVDHPDEKSIITYVVTYYHYFSKMKALAVEGKRIGKVLDNAIETEKMIEKYESLASDLLEWIEQTIIILNNRKFANSLVGVQQQLQAFNTYRTVEKPPKFTEKGNLEVLLFTIQSKMRANNQKVYMPREGKLISDINKAWERLEKAEHERELALRNELIRQEKLEQLARRFDRKAAMRETWLSENQRLVSQDNFGFDLPAVEAATKKHEAIETDIAAYEERVQAVVAVARELEAENYHDIKRITARKDNVIRLWEYLLELLRARRQRLEMNLGLQKIFQEMLYIMDWMDEMKVLLLSQDYGKHLLGVEDLLQKHALVEADIAIQAERVRGVNASAQKFATDGEGYKPCDPQVIRDRVAHMEFCYQELCQLAAERRARLEESRRLWKFFWEMAEEEGWIR

SEQ ID NO: 781 - protein, 521 aa, mus musculus
MMGHRPVLVLSQNTKRESGRKVQSGNINAAKTIADIIRTCLGPKSMMKMLLDPMGGIVMTNDGNAILREIQVQHPAAKSMIEISRTQDEEVGDGTTSVIILAGEMLSVAEHFLEQQMHPTVVISAYRMALDDMISTLKKISTPVDVNNREMMLSIINSSITTKVISRWSSLACNIALDAVKTVQFEENGRKEIDIKKYARVEKIPGGIIEDSCVLRGVMINKDVTHPRMRRYIKNPRIVLLDSSLEYKKGESQTDIEITREEDFTRILQMEEEYIHQLCEDIIQLKPDVVITEKGISDLAQHYLMRANVTAIRRVRKTDNNRIARACGARIVSRPEELREDDVGTGAGLLEIKKIGDEYFTFITDCKDPKACTILLRGASKEILSEVERNLQDAMQVCRNVLLDPQLVPGGGASEMAVAHALTEKSKAMTGVEQWPYRAVAQALEVIPRTLIQNCGASTIRLLTSLRAKHTQESCETWGVNGETGTLVDMKELGIWEPLAVKLQTYKTAVEVRHHMLFLSR

SEQ ID NO: 782 - protein, 515 aa, mus musculus
MKKLRASVRSHKKQPANHKRRRTRALSSSQAKPSSLDGLAKQKREELLQASVSPYHLFSDVADVTAFRSNLLSWYDQEKRDLPWRNLAKEEANSDRRAYAVWVSEVMLQQTQVATVIDYYTRWMQKWPKLQDLASASLEEVNQLWSGLGYYSRGRRLQEGARKVVEELGGHMPRTAETLQQLLPGVGRYTAGAIASIAFDQVTGVVDGNVLRVLCRVRAIGADPTSTLVSHHLWNLAQQLVDPARPGDFNQAAMELGATVCTPQRPLCSHCPVQSLCRAYQRVERGQLSALPGRPDIEECALNTRQCQLCLPPSSPWDPSMGVANFPRKASRRPPREEYSATCVVEQPGAIGGPLVLLVQRPDSGLLAGLWEFPSVTLEPSEQHQHKALLQELQRWCGPLPAIRLQHLGEVIHIFSHIKLTYQVYSLALDQAPASTAPPGARWLTWEEFCNAAVSTAMKKVFRMYEDHRQGTRKGSKRSQVCPPSSRKKPSLGQQVLDTFFQRHIPTDKPNSTTQ

SEQ ID NO: 783 - protein, 201 aa, mus musculus
MARDYDHLFKLLIIGDSGVGKSSLLLRFADNTFSGSYITTIGVDFKIRTVEINGEKVKLQIWDTAGQERFRTITSTYYRGTHGVIVVYDVTSAESFVNVKRWLHEINQNCDDVCRILVGNKNDDPERKVVETEDAYKFAGQMGIQLFETSAKENVNVEEMFNCITELVLRAKKDNLAKQQQQQQNDVVKLTKNSKRKKRCC

SEQ ID NO: 784 - protein, 377 aa, mus musculus
MCEEEDSTALVCDNGSGLCKAGFAGDDAPRAVFPSIVGRPRHQGVMVGMGQKDSYVGDEAQSKRGILTLKYPIEHGIITNWDDMEKIWHHSFYNELRVAPEEHPTLLTEAPLNPKANREKMTQIMFETFNVPAMYVAIQAVLSLYASGRTTGIVLDSGDGVTHNVPIYEGYALPHAIMRLDLAGRDLTDYLMKILTERGYSFVTTAEREIVRDIKEKLCYVALDFENEMATAASSSSLEKSYELPDGQVITIGNERFRCPETLFQPSFIGMESAGIHETTYNSIMKCDIDIRKDLYANNVLSGGTTMYPGIADRMQKEITALAPSTMKIKIIAPPERKYSVWIGGSILASLSTFQQMWISKQEYDEGGPSIVHRKCF

SEQ ID NO: 785 - protein, 714 aa, mus musculus
WSCCEQTGSKLVSSGKSSVLESLVGRDLLPRGTGVVTRRPLILQLVHVSPEDKRKTTGEENGVEAEEWGKFLHTKNKLYTDFDEIRQEIENETERISGNNKGVSPEPIHLKVFSPNVVNLTLVDLPGMTKVPVGDQPKDIELQIRELILRFISNPNSIILAVTAANTDMATSEALKISREVDPDGRRTLAVITKLDLMDAGTDAMDVLMGRVIPVKLGIIGVVNRSQLDINNKKSVTDSIRDEYAFLQKKYPSLANRNGTKYLARTLNRLLMHHIRDCLPELKTRINVLAAQYQSLLNSYGEPVDDKSATLLQLITKFATEYCNTIEGTAKYIETSELCGGARICYIFHETFGRTLESVDPLGGLNTIDILTAIRNATGPRPALFVPEVSFELLVKRQIKRLEEPSLRCVELVHEEMQRIIQHCSNYSTQELLRFPKLHDAIVEVVTCLLRKRLPVTNEMVHNLVAIELAYINTKHPDFADACGLMNNNIEEQRRNRLARELPSAGSRDKSSKVPSALAPASQEPPPAASAEADGKLIQDNRRETKNVPSAGGGIGDGGQEPTTGNWRGMLKTSKAEELLAEEKSKPIPIMPASPQKGHAVNLLDVPVPVARKLSAREQRDCEVIERLIKSYFLIVRKNIQDSVPKAVMHFLVNHVKDTLQSELVGQLYKSSLLDDLLTESEDMAQRRKEAADMLKALQGASQIIAEIRETHLW

SEQ ID NO: 786 - protein, 200 aa, mus musculus
MAKKTYDLLFKLLLIGDSGVGKTCVLFRFSDDAFNTTFISTIGIDFKIKTVELQGKKIKLQIWDTAGQERFHTITTSYYRGAMGIMLVYDITNGKSFENISKWLRNIDEHANEDMERMLLGNKCDMDDKRVVPKGKGEQIAREHGIRFFETSAKANINIEKAFLTLAEDILRKTPVKEPNSENVDISSGGGVTGWKSKCC

SEQ ID NO: 787 - protein, 247 aa, mus musculus
MSGKDRIEIFPSRMAQTIMKARLKGAQTGRNLLKKKSDALTLRFRQILKKIIETKMLMGEVMREAAFSLAEAKFTAGDFSTTVIQNVNKAQVKIRAKKDNVAGVTLPVFEHYHEGTDSYELTGLARGGEQLAKLKRNYAKAVELLVELASLQTSFVTLDEAIKITNRRVNAIEHVIIPRIERTLAYIITGLDEREREEFYRLKKIQEKKKIIKEKFEKDLERRRAAGEVMEPANLLAEEKDEDLLFE

SEQ ID NO: 788 - protein, 466 aa, mus musculus
MSTRSVSSSSYRRMFGGSGTSSRPSSNRSYVTTSTRTYSLGSALRPSTSRSLYSSSPGGAYVTRSSAVRLRSSVPGVRLLQDSVDFSLADAINTEFKNTRTNEKVELQELNDRFANYIDKVRFLEQQNKILLAELEQLKGQGKSRLGDLYEEEMRELRRQVDQLTNDKARVEVERDNLAEDIMRLRDKLQEEMLQREEAESTLQSFRQDVDNASLARLDLERKVESLQEEIAFLKKLHDEEIQELQAQIQEQHVQIDVDVSKPDLTAALRDVRQQYESVAAKNLQEAEEWYKSKFADLSEAANRNNDALRQAKQESNEYRRQVQSLTCEVDALKGTNESLERQMREMEENFALEAANYQDTIGRLQDEIQNMKEEMARHLREYQDLLNVKMALDIEIATYRKLLEGEESRISLPLPTFSSLNLRETNLESLPLVDTHSKRTLLIKTVETRDGQVINETSQHHDDLE

SEQ ID NO: 789 - protein, 562 aa, mus musculus
MVKIVTVKTQAYPDQEPGTSGLRKRVKVFQSNANYAENFIQSIVSTVEPALRQEATLVVGGDGRFYMTEAIQLIVRIAAANGIGRLVIGQNGILSTPAVSCIIRKIKAIGGIILTASHNPGGPNGDFGIKFNISNGGPAPEAITDKIFQISKTIEEYAICPDLKVDLGVLGKQQFDLENKFKPFTVEIVDSVEAYATMLRNIFDFNALKELLSGPNRLKIRIDAMHGVVGPYVKKILCEELGAPANSAVNCVPLEDFGGHHPDPNLTYAADLVETMKSGEHDFGAAFDGDGDRNMILGKHGFFVNPSDSVAVIAANIFSIPYFQQTGVRGFARSMPTSGALDRVANATKIALYETPTGWKFFGNLMDASKLSLCGEESFGTGSDHIREKDGLWAVLAWLSILATRKQSVEDILKDHWQKFGRNFLTRYDYEEVEAEGANKMMKDLEALMLDRSFVGKQFSANDKVYTVEKADNFEYSDPVDGSISKNQGLRLIFADGSRIIFRLSGTGSAGATIRLYIDSYEKVVAKINQDPQVMLAPLISIALKVSQLQERTGRTAPTVIT

SEQ ID NO: 790 - protein, 208 aa, mus musculus
ELGLRVLGCKASSVLRASTCLAGRAGRKEAGWECGGARSFSSSAVTMAPIKVGDAIPSVEVFEGEPGKKVNLAELFKGKKGVLFGVPGAFTPGCSKTHLPGFVEQAGALKAKGAQVVACLSVNDVFVIEEWGRAHQAEGKVRLLADPTGAFGKATDLLLDDSLVSLFGNRRLKRFSMVIDNGIVKALNVEPDGTGLTCSLAPNILSQL

SEQ ID NO: 791 - protein, 140 aa, mus musculus
MAGWNAYIDSLMADGTCQDAAIVGYKDSPSVWAAVPGKTFVSITPAEVGVLVGKDRLSFFVNGLTLGGQKCSVIRDSLLQDGEFTMDLRTKSTGGAPTFNVTVTMTAKTLVLLMGKEGVHGGLINKKCYEMASHLRRSQY

SEQ ID NO: 792 - protein, 545 aa, mus musculus
MEFAELIKTPRVDNVVLHRPFYTAVEGTLCLTGHHLILSSRQDNTEELWLPHSNIDAIDKRFVGSLGTIIIKCKDFRIIQLDIPGMEECLNIASSIEALSTLDSVTLMYPFFYRPMFEVIEDGWHSFLPEQEFEFYSSATSEWRLSYINKDFSICPSYPPTVIVPKSVDDEALRKVAAFRHGGRFPVLSYYHKKNGMVIMRSGQPLTGTNGRRCKEDEKLINATLRAGKRGYLIDTRSLNVAQQARAKGGGFEQEAHYPQWRRIHKSIERYHVLQESLIKLVEACNEQTHNMDRWLGKLEASNWLTHIKEILTTACLAAQCIDREGASVLIHGTEGTDSTLQVTSLAQIILEPRSRTIRGFEALIEREWLQAGHPFQQRCAQSAYCSSKQKWEAPVFLLFLDCVWQILRQFPCSFEFNEHFLIMLFEHAYASQFGTFLGNNESERCKLKLQQKTMSLWSWVNRPGELSKFTNPLFEANNLVIWPSVAPQSLQLWEGIFLRWSRSSKYLDEAYEEMVNIIEYNKELQAKVNVLRRQLAELETEDGL

SEQ ID NO: 793 - protein, 456 aa, mus musculus
MADGGSERADGRIVKMEVDYSATVDQRLPECEKLAKEGRLQEVIETLLSLEKQTRTASDMVSTSRILVAAVKMCYEAKEWDLLNENIMLLSKRRSQLKQAVAKMVQQCCTYVEEITDLPVKLRLIDTLRMVTEGKIYVEIERARLTKTLATIKEQNGDVKEAASILQELQVETYGSMEKKERVEFILEQMRLCLAVKDYIRTQIISKKINTKFFQEENTENLKLKYYNLMIQLDQHEGSYLSICKHYRAIYDTPCIQAESDKWQQALKSVVLYVILAPFDNEQSDLVHRISSDKKLEEIPKYKDLLKLFTTMELMRWSTLVEDYGVELRKGSSETPATDVFSSTEEGEKRWKDLKSRVVEHNIRIMAKYYTRITMKRMAQLLDLSVDESEAFLSNLVVNKTIFAKVDRLAGVINFQRPKDPNNLLNDWSQKLNSLMSLVNKTTHLIAKEEMIHNLQ

SEQ ID NO: 794 - protein, 222 aa, mus musculus
MLCRAACSTGRRLGPVAGAAGSRHKHSLPDLPYDYGALEPHINAQIIQLHHSKHHAAYVNNFNATEEKYHEALAKGDVTTQVALQPALKFNGGGHINHTIFWTNLSPKGGGEPKGELLEAIKRDFGSFEKFKEKLTAVSVGVQGSGWGWLGFNKEQGRLQIAACSNQDPLQGTTGLIPLLGIDVWEHAYYLQYKNVRPDYLKAIWNVINWENVTERYTACKK

SEQ ID NO: 795 - protein, 520 aa, mus musculus
MAALKLLSSGLRLGASARSSRGALHKGCVCYFSVSTRHHTKFYTDPVEAVKDIPNGATLLVGGFGLCGIPENLIGALLKTGVKDLTAVSNNAGVDNFGLGLLLRSKQIKRMIFSYVGENAEFERQFLSGELEVELTPQGTLAERIRAGGAGVPAFYTSTGYGTLVQEGGSPIKYNKDGSVAIASKPREVREFNGQHFILEEAITGDFALVKAWKADRAGNVIFRKSARNFNLPMCKAAGTTVVEVEEIVDIGSFAPEDIHIPKIYVHRLIKGEKYEKRIERLSLRKEGDGKGKSGKPGGDVRERIIKRAALEFEDGMYANLGIGIPLLASNFISPNMTVHLQSENGVLGLGPYPLKDEADADLINAGKETVTVLPGASFFSSDESFAMIRGGHVNLTMLGAMQVSKYGDLANWMIPGKMVKGMGGAMDLVSSSKTKVVVTMEHSAKGNAHKIMEKCTLPLTGKQCVNRIITEKGVFDVDKKNGLTLIELWEGLTVDDIKKSTGCDFAVSPNLMPMQQIST

SEQ ID NO: 796 - protein, 375 aa, mus musculus
MDSVRSGPFGQLFRPDNFIFGQTGAGNNWAKGHYTEGAELVDSVLDVVRKECEHCDCLQGFQLTHSLGGGTGSGMGTLLISKIREEYPDRIMSTFSVMPSPKVSDTVVEPYNATLSVHQLVENTDETYCIDNEALYDICFRTLKLTTPTYGDLNHLVSATMSGVTTSLRFPGQLNADLRKLAVNMVPFPRLHFFMPGFAPLTARGSQQYRALTVPELTQQMFDAKNMMAACDPRHGRYLTVATVFRGPMSMKEVDEQMLAIQNKNSSYFVEWIPNNVKVAVCDIPPRGLKMASTFIGNSTAIQELFKRISEQFSAMFRRKAFLHWFTGEGMDEMEFTEAESNMNDLVSEYQQYQDATVNDGEEAFEDEDEEEINE

SEQ ID NO: 797 - protein, 340 aa, mus musculus
MSELEQLRQEAEQLRNQIRDARKACGDSTLTQITAGLDPVGRIQMRTRRTLRGHLAKIYAMHWGTDSRLLVSASQDGKLIIWDSYTTNKVHAIPLRSSWVMTCAYAPSGNFVACGGLDNICSIYSLKTREGNVRVSRELPGHTGYLSCCRFLDDNQIITSSGDTTCALWDIETGQQTVGFAGHSGDVMSLSLAPDGRTFVSGACDASIKLWDVRDSMCRQTFIGHESDINAVAFFPNGYAFTTGSDDATCRLFDLRADQELLMYSHDNIICGITSVAFSRSGRLLLAGYDDFNCNIWDAMKGDRAGVLAGHDNRVSCLGVTDDGMAVATGSWDSFLKIWN

SEQ ID NO: 798 - protein, 289 aa, mus musculus
MSGFSSEERAAPFTLEYRVFLKNEKGQYISPFHDVPIYADKDVFHMVVEVPRWSNAKMEIATKDPLNPIKQDVKKGKLRYVANLFPYKGYIWNYGAIPQTWEDPGHSDKHTGCCGDNDPIDVCEIGSKVCARGEIIRVKVLGILAMIDEGETDWKVIAINVNDPDAANYKDISDVERLKPGYLEATVDWFRRYKVPDGKPENEFAFNAEFKNKDFAVDIIKSTHDYWKALVTKKTDGKGISCMNTTVSESPFKCDPDAAKAIVDALPPPCESACSLPTDVDKWFHQQKN

SEQ ID NO: 799 - protein, 286 aa, mus musculus
MADFEDRVSDEEKVRVAAKFITHAPPGEFNEVFNDVRLLLNNDNLLREGAAHAFAQYNMDQFTPVKIEGYDDQVLITEHGDLGNSRFLDPRNQISFKFDHLRKEASDPQPEDVDGGLKSWRESCDSALRAYVKDHYSNGFCTVYAKTIDGQQTIIACIESHQFQPKNFWNGRWRSEWKFTITPPSAQVVGVLKIQVHYYEDGNVQLVSHKDVQDSVTVSNEIQTTKEFIKIIESAENEYQTAISENYQTMSDTTFKALRRQLPVTRTKIDWNKILSYKIGKEMQNA

SEQ ID NO: 800 - protein, 370 aa, mus musculus
MSHASPAAKPSNSKNPRVFFDVDIGGERVGRIVLELFADIVPKTAENFRALCTGEKGTGSTTGKPLHFKGCPFHRIIKKFMIQGGDFSNQNGTGGESIYGEKFEDENFHYKHDREGLLSMANAGPNTNGSQFFITTVPTPHLDGKHVVFGQVIKGLGVARTLENVEVNGEKPAKLCVIAECGELKEGDDWGIFPKDGSGDSHPDFPEDADIDLKDVDKILLISEDLKNIGNTFFKSKNWEMAIKKYAKVLRYVDSSKAVIEKADRSRLQPIALSCVLNIGACKLKMSNWQGAIDSCLEALEMDPSNTKALYRKAQGWQGLKEYDQALADLKKAQEIAPGDKAIQAELLKVKQMIKAQKDKEKAVYAKMFA

SEQ ID NO: 801 - protein, 286 aa, mus musculus
MADLEEQLSDEEKVRIAAKFIIHAPPGEFNEVFNDVRLLLNNDNLLREGAAHAFAQYNLDQFTPVKIEGYEDQVLITEHGDMGNGKFLDPKNRICFKFDHLRKEATDPRPYEAENAIESWRTSVETALRAYVKEHYPNGVCTVYGKKVDGQQTIIACIESHQFQAKNFWNGRWRSEWKFTVTPSTTQVVGILKIQVHYYEDGNVQLVSHKDIQDSLTVSNEVQTAKEFIKIVEAAENEYQTAISENYQTMSDTTFKALRRQLPVTRTKIDWNKILSYKIGKEMQNA

SEQ ID NO: 802 - protein, 509 aa, mus musculus
PPLPPLPALLFPLRWRPASPPPQLRFSSPRFFPFPPTPGAQSGRTSRSLLYGGLRAPACAPFPAMNEEYDVIVLGTGLTECILSGIMSVNGKKVLHMDQNPYYGGESASITPLEDLYKRFKLPGQPPASMGRGRDWNVDLIPKFLMANGQLVKMLLFTEVTRYMDFKVIEGSFVYKGGKIYKVPSTEAEALASSLMGLFEKRRFRKFLVYVANFDEKDPRTFEGVDPKKTSMRDVYKKFDLGQDVIDFTGHSLALYRTDDYLDQPCCETINRIKLYSESLARYGKSPYLYPLYGLGELPQGFARLSAIYGGTYMLNKPIEEIIVQNGKVVGVKSEGEIARCKQLICDPSYVKDRVEKVGQVIRVICILSHPIKNTNDANSCQIIIPQNQVNRKSDIYVCMISFAHNVAAQGKYIAIVSTTVETKEPEKEIRPALELLEPIEQKFVSISDLFVPKDLGTDSQIFISRAYDATTHFETTCDDIKDIYKRMTGSEFDFEEMKRKKNDIYGED

SEQ ID NO: 803 - protein, 243 aa, mus musculus
MAVQISKKRKFVADGIFKAELNEFLTRELAEDGYSGVEVRVTPTRTEIIILATRTQNVLGEKGRRIRELTAVVQERFGFPEGSVELYAEKVATRGLCAIAQAESLRYKLLGGLAVRRACYGVLRFIMESGAKGCEVVVSGKLRGQRAKSMKFVDGLMIHSGDPVNYYVDTAVRHVLLRQGVLGIKVKIMLPWDPSGKIGPKKPLPDHVSIVEPKDEILPTTPISEQKGGKPEPPAMPQPVPTA

SEQ ID NO: 804 - protein, 551 aa, mus musculus
MGGSGQTLVMPLTSPVQDPKTCSGGSAVLCRDVKTAVDCGAVKHCQQMVWGKPTAKSLPCDICKTVVTEAGNLLKDNATQEEILHYLEKTCEWIHDSSLSASCKEVVDSYLPVILDMIKGEMSNPGEVCSALNLCQSLQEYLAEQNQKQLESNKIPEVDMARVVAPFMSNIPLLLYPQDHPRSQPQPKANEGVCQDCMKLVSDVQTAVKTNSSFIQGFVDHVKEDCDRLGPGVSDICKNYVDQYSEVCVQMLMHMQPKEICVLAGFCNEVKRVPMKTLVPATETIKNILPALEMMDPYEQNLVQAHNVILCQTCQFVMNKFSELIVNNATEELLVKGLSNACALLPDPARTKCQEVVGTFGPSLLDIFIHEVNPSSLCGVIGLCAARPELVEALEQPAPAIVSALLKEPTPPKQPAQPKQSALPAHVPPQKNGGFCEVCKKLVLYLEHNLEKNSTKEEILAALEKGCSFLPDPYQKQCDDFVAEYEPLLLEILVEVMDPGFVCSKIGVCPSAYKLLLGTEKCVWGPSYWCQNMETAARCNAVDHCKRHVWN

SEQ ID NO: 805 - protein, 128 aa, mus musculus
MASQKRPSQRSKYLATASTMDHARHGFLPRHRDTGILDSIGRFFSGDRGAPKRGSGKDSHTRTTHYGSLPQKSQHGRTQDENPVVHFFKNIVTPRTPPPSQGKGRGLSLSRFSWGGRDSRSGSPMARR

SEQ ID NO: 806 - protein, 365 aa, mus musculus
MSSAPPRSPTPRAPKMKKDESFLGKLGGTLARKKKTREVTDLQEEGKSAINSPMAPALVDIHPEDTQLEENEERTMIDPTSREDPKFKELVKVLLDWINDVLAEERIIVKQLEEDLYDGQVLQKLLEKLAHCKLNVAEVTQSEIGQKQKLQTVLEAVQDLLRPHGWPLRWNVDSIHGKNLVAILHLLVSLAMHFRAPIHLPEHVTVQVVVVRKREGLLHSSHISEELTTTTEIMMGRFERDAFDTLFDHAPDKLNLVKKSLITFVNKHLNKLNLEVTDLETQFADGVYLVLLLGLLEDYFVPLHNFYLTPDSFDQKVHNVAFAFELMLDGGLKKPKARPEDVVNLDLKSTLRVLYTLFTKYKDVE

SEQ ID NO: 807 - protein, 838 aa, mus musculus
MSGQTLTDRIAAAQYSVTGSAVARAVCKATTHEVMGPKKKHLDYLIQATNETNVNIPQMADTLFERATNSSWVVVFKALVTTHHLMVHGNERFIQYLASRNTLFNLSNFLDKSGSHGYDMSTFIRRYSRYLNEKAFSYRQMAFDFARVKKGADGVMRTMVPEKLLKSMPILQGQIDALLEFDVHPNELTNGVINAAFMLLFKDLIKLFACYNDGVINLLEKFFEMKKGQCKDALEIYKRFLTRMTRVSEFLKVAEQVGIDKGDIPDLTQAPSSLMETLEQHLNTLEGKKPGNKSGAPSPLSKSPPATTVTSPNSTPAKTIDTSPPVDIFATASAAAPVSSAKPSSDLLDLQPDFSGAAAGAAAPVVPPSGGATAWGDSLAALSSVPCEAPISDPFAPEPSPPTTTTEPASASASTTTAVTAVTTEVDLFGDAFAASPGEAPAASEGATAPATPAPVAAALDACSGNDPFAPSEGSAEAAPELDLFAMKPPETSAPVVTPTASTAPPVPATAPSPAPTAVAATAATTTAAAAATTTATTSAAAATTAAAPPALDIFGDLFDSAPEVAAAPKPDAAPSIDLFGTDAFSSPPRGASPVPESSLTADLLSVDAFAAPSPASTASPAKAESSGVIDLFGGFGGSFMAPSTTPVTPAQNNLLQPSFEAAFGTTPSTSSSSSFDPSVFDGLGDLLMPTMAPSGQPAPVSMVPPSPAMAASKGLGSDLDSSLASLVGNLGISGTTSKKGDLQWNAGEKKLTGGANWQPKVTPATWSAGVPPPPSGTGMTMMSQQPVMFAQPMMRPPFGAAAVPGTQLSPSPTPATQSPKKPPAKDPLADLNIKDFL

SEQ ID NO: 808 - protein, 1614 aa, mus musculus
METAPTRAPPPPPPPLLLLVLYCSLVPAAASPLLLFANRRDVRLVDAGGVKLESTIVASGLEDAAAVDFQFSKGAVYWTDVSEEAIKQTYLNQTGAAAQNIVISGLVSPDGLACDWVGKKLYWTDSETNRIEVANLNGTSRKVLFWQDLDQPRAIALDPAHGYMYWTDWGEAPRIERAGMDGSTRKIIVDSDIYWPNGLTIDLEEQKLYWADAKLSFIHRANLDGSFRQKVVEGSLTHPFALTLSGDTLYWTDWQTRSIHACNKWTGEQRKEILSALYSPMDIQVLSQERQPPFHTPCEEDNGGCSHLCLLSPREPFYSCACPTGVQLQDNGKTCKTGAEEVLLLARRTDLRRISLDTPDFTDIVLQVGDIRHAIAIDYDPLEGYVYWTDDEVRAIRRAYLDGSGAQTLVNTEINDPDGIAVDWVARNLYWTDTGTDRIEVTRLNGTSRKILVSEDLDEPRAIVLHPVMGLMYWTDWGENPKIECANLDGRDRHVLVNTSLGWPNGLALDLQEGKLYWGDAKTDKIEVINIDGTKRKTLLEDKLPHIFGFTLLGDFIYWTDWQRRSIERVHKVKASRDVIIDQLPDLMGLKAMNVAKVVGTNPCADGNGGCSHLCFFTPRATKCGCPIGLELLSDMKTCIIPEAFLVFTSRATIHRISLETNNNDVAIPLTGVKEASALDFDVSNNHIYWTDVSLKTISRAFMNGSSVEHVIEFGLDYPEGMAVDWMGKNLYWADTGTNRIEVARLDGQFRQVLVWRDLDNPRSLALDPTKGYIYWTEWGGKPRIVRAFMDGTNCMTLVDKVGRANDLTIDYADQRLYWTDLDTNMIESSNMLGQERMVIADDLPYPFGLTQYSDYIYWTDWNLHSIERADKTSGRNRTLIQGHLDFVMDILVFHSSRQDGLNDCVHSNGQCGQLCLAIPGGHRCGCASHYTLDPSSRNCSPPSTFLLFSQKFAISRMIPDDQLSPDLVLPLHGLRNVKAINYDPLDKFIYWVDGRQNIKRAKDDGTQPSMLTSPSQSLSPDRQPHDLSIDIYSRTLFWTCEATNTINVHRLDGDAMGVVLRGDRDKPRAIAVNAERGYMYFTNMQDHAAKIERASLDGTEREVLFTTGLIRPVALVVDNALGKLFWVDADLKRIESCDLSGANRLTLEDANIVQPVGLTVLGRHLYWIDRQQQMIERVEKTTGDKRTRVQGRVTHLTGIHAVEEVSLEEFSAHPCARDNGGCSHICIAKGDGTPRCSCPVHLVLLQNLLTCGEPPTCSPDQFACTTGEIDCIPGAWRCDGFPECADQSDEEGCPVCSASQFPCARGQCVDLRLRCDGEADCQDRSDEANCDAVCLPNQFRCTSGQCVLIKQQCDSFPDCADGSDELMCEINKPPSDDIPAHSSAIGPVIGIILSLFVMGGVYFVCQRVMCQRYTGASGPFPHEYVGGAPHVPLNFIAPGGSQHGPFPGIPCSKSVMSSMSLVGGRGSVPLYDRNHVTGASSSSSSSTKATLYPPILNPPPSPATDPSLYNVDVFYSSGIPATARPYRPYVIRGMAPPTTPCSTDVCDSDYSTSRWKSSKYYLDLNSDSDPYPPPPTPHSQYLSAEDSCPPSPGTERSYCHLFPPPPSPCTDSS

SEQ ID NO: 809 - protein, 733 aa, mus musculus
MPEETQTQDQPMEEEEVETFAFQAEIAQLMSLIINTFYSNKEIFLRELISNSSDALDKIRYESLTDPSKLDSGKELHINLIPSKQDRTLTIVDTGIGMTKADLINNLGTIAKSGTKAFMEALQAGADISMIGQFGVGFYSAYLVAEKVTVITKHNDDEQYAWESSAGGSFTVRTDTGEPMGRGTKVILHLKEDQTEYLEERRIKEIVKKHSQFIGYPITLFVEKERDKEVSDDEAEEKEEKEEEKEKEEKESDDKPEIEDVGSDEEEEEKKDGDKKKKKKIKEKYIDQEELNKTKPIWTRNPDDITNEEYGEFYKSLTNDWEEHLAVKHFSVEGQLEFRALLFVPRRAPFDLFENRKKKNNIKLYVRRVFIMDNCEELIPEYLNFIRGVVDSEDLPLNISREMLQQSKILKVIRKNLVKKCLELFTELAEDKENYKKFYEQFSKNIKLGIHEDSQNRKKLSELLRYYTSASGDEMVSLKDYCTRMKENQKHIYFITGETKDQVANSAFVERLRKHGLEVIYMIEPIDEYCVQQLKEFEGKTLVSVTKEGLELPEDEEEKRKQEEKKTKFENLCKIMKDILEKKVEKVVVSNRLVTSPCCIVTSTYGWTANMERIMKAQALRDNSTMGYMAAKKHLEINPDHSIIETLRQKAEADKNDKSVKDLVILLYETALLSSGFSLEDPQTHANRIYRMIKLGLGIDEDDPTVDDTSAAVTEEMPPLEGDDDTSRMEEVD

SEQ ID NO: 810 - protein, 434 aa, mus musculus
MSIEKIWAREILDSRGNPTVEVDLYTAKGLFRAAVPSGASTGIYEALELRDGDKQRYLGKGVLKAVDHINSRIAPALISSGISVVEQEKLDNLMLELDGTENKSKFGANAILGVSLAVCKAGAAERDLPFYRHIAQLAGNSDLILPVPAFNVINGGSHAGNKLAMQEFMILPVGAESFRDAMRLGAEVYHTLKGVIKDKYGKDATNVGDEGGFAPNILENSEALELVKEAIDKAGYTEKMVIGMDVAASEFYRDGKYDLDFKSPADPSRYITGDQLGALYQDFVRNYPVVSIEDPFDQDDWAAWSKFTANVGIQIVGDDLTVTNPKRIERAVEEKACNCLLLKVNQIGSVTEAIQACKLAQENGWGVMVSHRSGETEDTFIADLVVGLCTGQIKTGAPCRSERLAKYNQLMRIEEELGDEARFAGHNFRNPSVL

SEQ ID NO: 811 - protein, 351 aa, mus musculus
MDFLRNLFTQTLGLGSQKERLLDELTLEGVTRYMQSERCRKVICLVGAGISTSAGIPDFRSPSTGLYANLEKYHLPYPEAIFEISYFKKHPEPFFALAKELYPGQFKPTICHYFIRLLKEKGLLLRCYTQNIDTLERVAGLEPQDLVEAHGTFYTSHCVNTSCRKEYTMGWMKEKIFSEATPRCEQCQSVVKPDIVFFGENLPSRFSCMQSDFSKVDLLIIMGTSLQVQPFASLISKAPLATPRLLINKEKTGQTDPFLGMMMGLGGGMDFDSKKAYRDVAWLGDCDQGCLALADLLGWKKELEDLVRREHANIDAQSGSQAPNPSTTISPGKSPPPAKEAARTKEKEEQQ

SEQ ID NO: 812 - protein, 599 aa, mus musculus
GVLSLFARARLSIVALGAPRANPRPQYVVQLRRNGAEAYCSERLCDRTLYFSGRSESSHYLLCALGDGALFYFGLNIETGLLSDRKKVTLGTQPTVLRTFRSLSTTNVFACSDRPTVIYSSNHKLVFSNVNLKEVNYMCPLNSDGYPDSLALANNSTLTIGTIDEIQKLHIRTVPLYESPRKICYQEVSQCFGVLSSRIEVQDSSGGTTALRPSASTQALSSSVSSSKLFSSSTAPHETSFGEEVEVHNLLIIDQHTFEVLHAHQFLQNEYALSLVSCKLGKDPNTYFIVGTAMVYPEEAEPKQGRIAVFQYSDGKLQTVAEKEVKGAVYSMVEFNGKLLASINSTVRLYEWTTEKELRTECNHYNNIMALYLKTKGDFILVGDLMRSVLLLAYKPMEGNFEEIARDFNPNWMSAVEILDDDNFLGAENAFNLFVCQKDSAATTDEERQHLQEVGLFHLGEFVNVFCHGSLVMQNLGEASTPTQGSVLFGTVNGMIGLVTSLSESWYNLLLDMQNRLNKVIKSVGKIEHSFWRSFHTERKTEPATGFIDGDLIESFLDISRPKMQEVVANLQYDDGSGMKREATADDLIKVVEELTRIH

SEQ ID NO: 813 - protein, 216 aa, mus musculus
MAAQGEPQVQFKLVLVGDGGTGKTTFVKRHLTGEFEKKYVATLGVEVHPLVFHTNRGPIKFNVWDTAGQEKFGGLRDGYYIQAQCAIIMFDVTSRVTYKNVPNWHRDLVRVCENIPIVLCGNKVDIKDRKVKAKSIVFHRKKNLQYYDISAKSNYNFEKPFLWLARKLIGDPNLGFVAMPALAPPEVVMDPALAAQYEHDLEVAQTTALPDEDDDL

SEQ ID NO: 814 - protein, 335 aa, mus musculus
ERDGLAEEVQRLRARCEEESRGREGAERALKAQQRDVDGATLARLDLEKKVESLLDELAFVRQVHDEEVAELLATLQASSQAAAEVDVAVAKPDLTSALREIRAQYESLAAKNLQSAEEWYKSKFANLNEQAARSTEAIRASREEIHEYRRQLQARTIEIEGLRGANESLERQILELEERHSAEVAGYQDSIGQLESDLRNTKSEMARHLREYQDLLNVKMALDIEIAAYRKLLEGEETRFSTGGLSISGLNPLPNPSYLLPPRILSSTASKVSSAGLSLKKEDEEEEEEASKEVSKKTSKVGEGFEETLGEAVLSTKKTGKLATEESTSSSQKM

SEQ ID NO: 815 - protein, 418 aa, mus musculus
MVAQPKNLEGYVGFANLPNQVYRKSVKRGFEFTLMVVGESGLGKSTLINSLFLTDLYSPEYPGPSHRIKKTVQVEQSKVLIKEGGVQLLLTIVDTPGFGDAVDNSNCWQPVIDYIDSKFEDYLNAESRVNRRQMPDNRVQCCLYFIAPSGHGLKPLDIEFMKRLHEKVNIIPLIAKADTLTPEECQQFKKQIMKEIQEHKIKIYEFPETDDEEENKLVKKIKDRLPLAVVGSNTIIEVNGKRVRGRQYPWGVAEVENGEHCDSTILRNMLIRTHMQDLKDVTNNVHYENYRSRKLAAVTYNGVDNNKNKGQLTKSPLAQMEEERREHVAKMKKMEMEVEQVFEMKVKEKVQKLKDSEAELQRRHEQMKRNLEAQHKELEEKRRQFEEEKANWEAQQRILEQQNSSRTLEKNKKKGKIF

SEQ ID NO: 816 - protein, 1810 aa, mus musculus
EILPRPPRALFCLTLQNPLRKACISIVEWKPFETIILLTIFANCVALAVYLPMPEDDNNTLNLGLEKLEYFFLIVFSIEAAMKIIAYGFLFHQDAYLRSGWNVLDFIIVFLGVFTVILEQVNIIQTNTAPMSSKGAGLDVKALRAFRVLRPLRLVSGVPSLQVVLNSIFKAMLPLFHIALLVLFMVIIYAIIGLELFKGKMHKTCYFIGTDIVATVENEKPSPCARTGSGRPCTINGSECRGGWPGPNHGITHFDNFGFSMLTVYQCISMEGWTDVLYWVNDAIGNEWPWIYFVTLILLGSFFILNLVLGVLSGEFTKEREKAKSRGTFQKLREKQQLEEDLRGYMSWITQGEVMDVDDLREGKLSLDEGGSDTESLYEIEGLNKIIQFIRHWRQWNRVFRWKCHDLVKSKVFYWLVILIVALNTLSIASEHHNQPLWLTHLQDVANRVLLTLFTIEMLMKMYGLGLRQYFMSIFNRFDCFVVCSGILEILLVESGAMSPLGISVLRCIRLLRLFKITKYWTSLSNLVASLLNSIRSIASLLLLLFLFIIIFALLGMQLFGGRYDFEDTEVRRSNFDNFPQALISVFQVLTGEDWNSVMYNGIMAYGGPTYPGVLVCIYFIILFVCGNYILLNVFLAIAVDNLAEAESLTSAQKAKAEERKRRKMSKGLPDKSEEERATVTKKLEQKSKGEGIPTTAKLKIDEFESNVNEVKDPYPSADFPGDDEEDEPEIPVSPRPRPLAELQLKEKAVPIPEASSFFIFSPTNKIRVLCHRIVNATWFTNFILLFILLSSAALAAEDPIRADSMRNQILEYFDYVFTAVFTVEIVLKMTTYGAFLHKGSFCRNYFNILDLLVVAVSLISMGLESSAISVVKILRVLRVLRPLRAINRAKGLKHVVQCVFVAIRTIGNIVLVTTLLQFMFACIGVQLFKGKFYSCNDLSKMTEEECRGYYYIYKDGDPTQIELRPRQWIHNDFHFDNVLSAMMSLFTVSTFEGWPQLLYKAIDSNEEDTGPVYNNRVEMAIFFIIYIILIAFFMMNIFVGFVIVTFQEQGETEYKNCELDKNQRQCVQYALKARPLRCYIPKNPYQYQVWYVVTSSYFEYLMFALIMLNTICLGMQHYNQSEQMNHISDILNVAFTIIFTLEMVLKLIAFKPRGYFGDPWNVFDFLIVIGSIIDVILSEIDDPDESARISSAFFRLFRVMRLVKLLNRAEGVRTLLWTFIKSFQALPYVALLIVMLFFIYAVIGMQMFGKIAMVDGTQINRNNNFQTFPQAVLLLFRCATGEAWQEILLACSYGKLCDPESDYAPGEEHTCGTNFAYYYFISFYMLCAFLIINLFVAVIMDNFDYLTRDWSILGPHHLDEFKAIWAEYDPEAKGRIKHLDVVTLLRRIQPPLGFGKFCPHRVACKRLVGMNMPLNSDGTVTFNATLFALVRTALKIKTEGNFEQANEELRAIIKKIWKRTSMKLLDQVIPPIGDDEVTVGKFYATFLIQEHFRKFMKRQEEYYGYRPKKDTVQIQAGLRTIEEEAAPEIHRAISGDLTAEEELERAMVEAAMEEGIFRRTGGLFGQVDNFLERTNSLPPVMANQRPLQFAEIEMEELESPVFLEDFPQNPGTHPLARANTNNANANVAYGNSSHRNNPVFSSICYEREFLGEADMPVTREGPLSQPCRASGPHSRSHVDKLKRPMTQRGMPEGQVPPSPCQLSQAEHPVQKEGKGPTSRFLETPNSRNFEEHVPRNSAHRCTAPATAMLIQEALVRGGLDSLAADANFVMATGQALADACQMEPEEVEVAATELLKQESPEGGAVPWEP

SEQ ID NO: 817 - protein, 908 aa, mus musculus
MLSFQRRGSCTLPPLRWLLLLAAWEAGSGQLHYSIPEEAKHGTFVGRIAQDLGLELTELVPRLFRVASKDRGDLLEVNLQNGILFVNSRIDREELCGRSAECSIHLEVIVDRPLQVFHVEVEVRDINDNPPVFPLREQRLLISESKQPDSRFPLEGASDADIGENAVLVYRLSQNEYFSLEPPINSKQTKRPSLILKKVLDREKTPELNLLLTATDGGKPELTGTVQLWVRVLDVNDNDPVFDHLEYKVRIMENAAKETLVITLNATDLDEGANGQLVYSLMSIKPTGRHLFTLDEKNGELRVNGTLDYEENKLYEIEVLATDKGTPPMVGHCVVLVEILDTNDNSPEVTLTSLSLPVREDAQPNTVIALISVSDLDSGINGQVTCSLTPNVPFKIVSTFKNYYSLVLDSSLDRERVSTYDLVVIARDGGSPSLSATVSVSVEVADVNDNAPVFAQPEYTVFVKENNPPGAHIFTVSAMDADAQENALVSYSLVERRVGERLLSSYVSVHAESGKVFALQPLDHEELELLQFQVSARDAGVPALGSNVTLQVFVLDENDNAPTLLPHGAVGAGGAVSELVSRSVGSGHVVTKVRAVDADSGYNAWLSYEVQLGTGGVRSPFRVGLYTGEISTTRALDEVDSPRQTLLVLVKDHGEPALTATATVLVSLVESGQAPKSFSQASGRASAPEASLVDVNVYLIIAICAVSSLLVLTLLLYTALRCSALPMVNEATGGPGKPMLVCSSEVGSWSYSQQRRQRVCSGEVLPKTDLMAFSPSLPPNLGRDERERQESESSHPGQPRQPNPDWRYSASLRAGMHSSVHLEEAGILRAGPGGPDQQWPTVSSATPGKESESRCSSGNLSNELFFLRAEMLMAPFWVFLFFHKTRPLDIHDCFHFMLRVLQELKVDN

SEQ ID NO: 818 - protein, 132 aa, mus musculus
MKQRFSAPQCLATQQVSVQTEGPRDSYLDHSLQDCPELRNPWLKMHFRPRSDSPHRTRKYSITQLFPAGRRRQAHIKVSPRLQRGAFTPLNNGGQRSQPSSSAPCSPNWAWKCLRSQRLSVPVGIQNGENMK

SEQ ID NO: 819 - protein, 427 aa, mus musculus
MAAADIARQVGEDCRTVPLAGHVGFDSLPDQLVNKSVSQGFCFHILCVGETGLGKSTLMDTLFNTKFEGEPATHTQPGVQLQSNTYDLQESNVGLKLTIVSTVGFGDQINKEDSYKPIVEFIDAQFEAYLQEELKIRRVLHSYHDSRIHVCLYFIAPTGHSLKSLDLVTMKKLDSKVNIIPVIAKSDAISKSELAKFKIKITSELVSNGVQIYQFPTDDESVSEINGTMNAHLPFAVVGSTEEVKIGNKMMRARQYPWGTVQVENEAHCDFVKLREMLIRVNMEDLREQTHARHYELYRRCKLEEMGFKDTDPDSKPFSLQETYEAKRNEFLGELQKKEEEMRQMFVQRVKEKEAELKEAEKELHEKFDRLKKLHQEEKKKLEDKKKCLDEEMNAFKQRKAAAELLQSQGSQAGGSQTLKRDKEKKN

SEQ ID NO: 820 - protein, 102 aa, mus musculus
NLTETLVGGSGGRQCPRRSFSTRSHHPPGDHDRNLYTVSRPSLSLEIDVQYLFNESVFRGKGLFCINTMENGIILHWCSTETQRDSYEVTSHQLRVNLSTAH

SEQ ID NO: 821 - protein, 1151 aa, mus musculus
MSDKMSSFLHIGDICSLYAEGSTNGFISTLGLVDDRCVVQPEAGDLNNPPKKFRDCLFKLCPMNRYSAQKQFWKAAKPGANSTTDAVLLNKLHHAADLEKKQNETENRKLLGTVIQYGNVIQLLHLKSNKYLTVNKRLPALLEKNAMRVTLDEAGNEGSWFYIQPFYKLRSIGDSVVIGDKVVLNPVNAGQPLNASSHQLVDNPGCNEVNSVNCNTSWKILLFMKWSDNKDDILKGGDVVRLFHAEQEKFLTCDEHRKKQHVFLRTTGRQSATSATSSKALWEVEVVQHDPCRGGAGYWNSLFRFKHLATGHYLAAEVDPDFEEECLEFQPSVDPDQDASRSRLRNAQEKMVYSLVSVPEGNDISSIFELDPTTLRGGDSLVPRNSYVRLRHLCTNTWVHSTNIPIYKEEEKPVMLKIGTSPLKEDKEAFAIVPVSPAEVRDLDFANDASKVLGSIAGKLEKGTITQNERRSVTKLLEDLVYFVTGGTNSGQDVLEVVFSKPNRERQKLMREQNILKQIFKLLQAPFTDCGDGPMLRLEELGDQRHAPFRHICRLCYRVLRHSQQDYRKNQEYIAKQFGFMQKQIGYDVLAEDTITALLHNNRKLLEKHITAAEIDTFVSLVRKNREPRFLDYLSDLCVSMNKSIPVTQELICKAVLNPTNADILIETKLVLSRFEFEGVSTGENALEAGEDEEEVWLFWRDSNKEIRSKSVRELAQDAKEGQKEDRDILSYYRYQLNLFARMCLDRQYLAINEISGQLDVDLILRCMSDENLPYDLRASFCRLMLHMHVDRDPQEQVTPVKYARLWSEIPSEIAIDDYDSSGTSKDEIKERFAQTMEFVEEYLRDVVCQRFPFSDKEKNKLTFEVVNLARNLIYFGFYNFSDLLRLTKILLAILDCVHVTTIFPISKMTKGEENKGSNVMRSIHGVGELMTQVVLRGGGFLPMTPMAAAPEGNVKQAEPEKEDIMVMDTKLKIIEILQFILNVRLDYRISCLLCIFKREFDESNSQSSETSSGNSSQEGPSNVPGALDFEHIEEQAEGIFGGSEENTPLDLDDHGGRTFLRVLLHLTMHDYPPLVSGALQLLFRHFSQRQEVLQAFKQVQLLVTSQDVDNYKQIKQDLDQLRSIVEKSELWVYKGQGPDEPMDGASGENE

SEQ ID NO: 822 - protein, 1102 aa, mus musculus
MELENYEQPVVLREDNLRRRRRMKPRSAAGSLSSMELIPIEFVLPTSQRISKTPETALLHVAGHGNVEQMKAQVWLRALETSVAAEFYHRLGPDQFLLLYQKKGQWYEIYDRYQVVQTLDCLHYWKLMHKSPGQIHVVQRHVPSEETLAFQKQLTSLIGYDVTDISNVHDDELEFTRRRLVTPRMAEVAGRDAKLYAMHPWVTSKPLPDYLSKKIANNCIFIVIHRGTTSQTIKVSADDTPGTILQSFFTKMAKKKSLMNISESQSEQDFVLRVCGRDEYLVGETPLKNFQWVRQCLKNGDEIHLVLDTPPDPALDEVRKEEWPLVDDCTGVTGYHEQLTIHGKDHESVFTVSLWDCDRKFRVKIRGIDIPVLPRNTDLTVFVEANIQHGQQVLCQRRTSPKPFAEEVLWNVWLEFGIKIKDLPKGALLNLQIYCCKTPSLSSKASAETPGSESKGKAQLLYYVNLLLIDHRFLLRHGDYVLHMWQISGKAEEQGSFNADKLTSATNPDKENSMSISILLDNYCHPIALPKHRPTPDPEGDRVRAEMPNQLRKQLEAIIATDPLNPLTAEDKELLWHFRYESLKHPKAYPKLFSSVKWGQQEIVAKTYQLLARREIWDQSALDVGLTMQLLDCNFSDENVRAIAVQKLESLEDDDVLHYLLQLVQAVKFEPYHDSALARFLLKRGLRNKRIGHFLFWFLRSEIAQSRHYQQRFAVILEAYLRGCGTAMLQDFTQQVHVIEMLQKVTIDIKSLSAEKYDVSSQVISQLKQKLESLQNSNLPESFRVPYDPGLKAGTLVIEKCKVMASKKKPLWLEFKCADPTVLSNETIGIIFKHGDDLRQDMLILQILRIMESIWETESLDLCLLPYGCISTGDKIGMIEIVKDATTIAQIQQSTVGNTEAFKDEVLNHWLKEKCPIEEKFQAAVERFVYSCAGYCVATFVLGIGDRHNDNIMISETGNLFHIDFGHILGNYKSFLGINKERVPFVLTPDFLFVMGSSGKKTSPHFQKFQDVCVRAYLALRHHTNLLIILFSMMLMTGMPQLTSKEDIEYIRDALTVGKSEEDAKKYFLDQIEVCRDKGWTVQFNWFLHLVLGIKQGEKHSA

SEQ ID NO: 823 - protein, 752 aa, mus musculus
MAVKEETDRPSPDLETDYDAGSISPENSISNGNFPKQSIKQLSRILDLEGSTFSNGHNHSIFSGLQGYKGGDAGQKVTKKEEMPPYTCQTLAHNTEKPYECKECGKCFGCRSTFTQHQSIHTGEKPYECEECGKAFRLPQQLTRHQKFHSGEKPFECNECGKAFHLPDLLKYHKTIHTGEKPFECRECGLYRIIHADVKPYKCSECGKAFKRRSNLVQHQKTHSDERPFQCKDCGKGFIVLAQLTRHQNIHTGEKSFECHECGKAFRLPQQLTRHQKSHSGEKPFKCNECGKAFHLPDLLKYHKTIHTSTKPFECRECGKSFHRISNLVEHRLIHADVKPHKCNECGKAFKRNKSLMQHQKIHSGERPFQCQECGKAFIVLAHLTRHQTIHTGEKSFECKECGKKFRTATHLVQHQSIHTGEKPFECNVCGKAFRLQIYLSEHQKTHMEAKHFECNICGKVFRLQVYLSEHQKTHTEEKPFKCKLCGSAFRSKYQLSKHHTVHTDEKPYQCKECGKCFRQRSNFTDHQSIHTGKKPFQCKECGKFYRLNTLLIRHQKSHSSERPYECKECGKAFHLPSELNNHQIVHTSNRPFECKVCGKSFKRESTLIQHMAIHSGVKSYECKECGKGFIHRSSLLHHRKIHSDEKPFKCQECGKAFVVLAYLTRHQSIHTGEKSFECQHCGSAFRYKSQLSKHQRIHTDVRLFQCMEGRNDFVHGLDLRIHQGIHTSETPFQCNEYGEPFHNHNQFSWTY

SEQ ID NO: 824 - protein, 263 aa, mus musculus
MARGPKKHLKRVAAPKHWMLDKLTGVFAPRPSTGPHKLRECLPLIIFLRNRLKYALTGDEVKKICMQRFIKIDGKVRTDITYPAGFMDVISIDKTGENFRLIYDTKGRFAVHRITPEEAKYKLCKVRKILVGTKGIPHLVTHDARTIRYPDPLIKVNDTIQIDLETGKITDFIKFDTGNLCMVTGGANLGRIGVITNRERHPGSFDVVHVKDANGNSFATRLSNIFVIGKGNKPWISLPRGKGIRLTIAEERDKRLAAKQSSG

SEQ ID NO: 825 - protein, 401 aa, mus musculus
MASEKPQDLMVTCTAPVNIAVIKYWGKRDEALILPINSSLSVTLHQDQLKTTTTVAISKDFTEDRIWLNGREEDVGQPRLQACLREIRRLARKRRSTEDGDTLPLSLSYKVHVASVNNFPTAAGLASSAAGYACLAYTLAQVYGVEGDLSEVARRGSGSACRSLYGGFVEWQMGEQADGKDSIARQIAPEWHWPQLRILILVVSADKKQTGSTVGMQTSVETSTLLKFRAESVVPERMKEMTRCIQEQDFQGFAQLTMKDSNQFHATCLDTFPPISYLNDTSRRIIQLVHRFNTHQGQTKVAYTFDAGPNAVIFTLEDTVAEFVAAVRHSFPPAANGDKFLKGLQVAPVLLSDELKAALAVEPSPGGVQYIIATQVGPGPQVLDDTHDHLLGQDGLPQRDL

SEQ ID NO: 826 - protein, 982 aa, mus musculus
MAADSEPESEVFEITDFTTASEWERFISKVEEVLNDWKLIGPSLGKPLEKGIFTSGTWEERSDEISFADFRFSVTHHYLVQESPDKERKDEELEDAIPQSMQDLLCMNNDFPPRAHCLVRWYGLREFVVIAPAAHSDAVLSESKCNLLLSSISIALGNTGCQVPLFVQIHHKWRRMYMGECQGPGVRTDFEMVHLRKVPSQYTHLSGLLDIFKSKIGCPLTPLPPVSIAIRLTYVLQDWQQYFWPQQPPDIDALVGGEVGGLEFGKLPFGACEDPISELHLATTWPHLTEGIIVDNDVYSDLDPVQAPHWSVRVRKADNPQCLLGDFVTEFLKICRRKESTDEILGRSTFEEEGREVADITHALSKLTEPAPVPIHKLSVSNMVHTAKKKIRKHRGEESPLNSDVLNTILLFLFPDAVSEKPLDGTTSIDNSIPAPEAGDYTLYNQFKSAPSDSLTYKLALCLCMINFYHGGLKGVAHLWQEFVLEMRFRWENNFLIPGLASGSPDLRCCLLHQKLQMLNCCIERKKARDEGKKTSLSDSTTSAYPGDAGKTGGQLGLDHLRDTEKEKGEVGKSWDSWSDSEEEFFECLSDTEDLKGNGQESGKKGGPKEMANLKPEGRLHQHGKLTLLHNGGPLYIPVTQEPAPMTEDLLEEQSEVLAKLGTSAEGAHLRARMQSACLLSDMESFKAANPGCFLEDFVRWYSPRDYIEEEVTDEKGNVVLKGELSARMKIPSNMWVEAWETAKPVPARRQRRLFDDTREAEKVLHYLAMQKPADLARHLLPCVIHAAVLKVKEEESLENIPSVKKIIKQIIAHSSKVLHFPNPEDKKLEEIILQITTVEAIIARARSLKAKFGTEKCEHEEEKEGLERFVSCLLEQPEVSVTGAGRGHAGRIIHKLFVNAQRAAAVALPEEELKKSGCPEERRQTLVSDFPPPAGRELILRATVPRPAPYSKAPAHSRMYSVLTKEDFRLAGAFSSDTSFL

SEQ ID NO: 827 - protein, 277 aa, mus musculus
MGLLECCARCLVGAPFASLVATGLCFFGVALFCGCGHEALTGTEKLIETYFSKNYQDYEYLINVIHAFQYVIYGTASFFFLYGALLLAEGFYTTGAVRQIFGDYKTTICGKGLSATVTGGQKGRGSRGQHQAHSLERVCHCLGKWLGHPDKFVGITYALTVVWLLVFACSAVPVYIYFNTWTTCQSIAFPSKTSASIGSLCADARMYGVLPWNAFPGKVCGSNLLSICKTAEFQMTFHLFIAAFVGAAATLVSLLTFMIAATYNFAVLKLMGRGTKF

SEQ ID NO: 828 - protein, 1157 aa, mus musculus
MLSSGVETQPVPLDSSMSAVVQELYSELSVSVSKELHAEQEPSKIADVKPGASRSPLSHGRASPLGLQRTHAEGCREESSETLDCRGKNGWCGLVDPTRDPMAYEILDREERPKSMEPKVFRDQGDQAQVFRDPCEGAKEDPCQHSTATKEKICPCQDLLPRQSSKGPVCADLPGEPQNNGGNVHNTTAALPELTEERQGTCTVSRMSKGKEESCDLDPVWEEADNHQQSLSHCKEKHSSAHNSSITKGSIDTVKPSEENSKILYLTSFLSGPKSLEKCGFECSGLIKACAEKTQKVDQMEDFTCGEERAVESSNHSNCHTEAGCPCTDSCTSMRNSSTEATEIMFKKTDVKITLNLHGNLINSEDHRKTVDVTHPEKRSEESSFSLLVHIEEPEQTTVKSSALNGKIYSKDATKSVVSIQRSLGDSLPSTALCNNFLFERKPPQSLMSEDPGSSEHNEISKPKKGTAKLPSSPGKPVQTSCDSISHFDEPITTCEMSKRSPNRALVAHKIEHECVSHQQVSLSSQDHVTTGSLSINREMPSATCRDVQESHHSLENGVNVTPDTQTIPAETKMEAMSPQGDRACGASSFIQTLNNKTRSSEGQKEMTAVHSTFFSSVRGAAASSFVTECQNVQSQDIFSCHCITRDASEKNMCSASAACELRKDSLKVSNCKIKCGNTSQDGNHCSQRPEGFVEKSTLLESEPAGREVQSSFLEGKVRSAVAAAVTHTASLNTATHMETGDEGLLGKKQDQRIDTEIYKHSTSACDTQELKQSANIPSPETLVDQSLSILSSHFKTMYQAAENLHQKADEVSDCQSNQNILDKCRCEGKPAGEGLNGDFGETDPEVSHRQKDLTVSSGSKVPLSCGGLKIKDPKRAFIDIPGSEEFTHSMLDVICPDCTDEPPEGVLGVEASSLSGHCTRQDTLAYHETIRSTSLLQGELNVECQGTELPNAAASSVDSSEIQKSHEEKVCNSLKDYEMEDCPDSAIDHEVKSVVDHEPNIRALDRAGVSLNSIHCEHQGKGGSMIEGLRLEANSEFGKRKTFGLSLKDSVSPGCQDSVKMVHSCLSSREHSPAGIFDEMPNSKHHFKPKDDEMLCENVKDCTVLSDMKAGIPMDLHNPSEGDSTYISVNKKVCKTCHSLKNSIDKHLPMTMETAI

SEQ ID NO: 829 - protein, 781 aa, mus musculus
MATQADLMELDMAMEPDRKAAVSHWQQQSYLDSGIHSGATTTAPSLSGKGNPEEEDVDTSQVLYEWEQGFSQSFTQEQVADIDGQYAMTRAQRVRAAMFPETLDEGMQIPSTQFDAAHPTNVQRLAEPSQMLKHAVVNLINYQDDAELATRAIPELTKLLNDEDQVVVNKAAVMVHQLSKKEASRHAIMRSPQMVSAIVRTMQNTNDVETARCTAGTLHNLSHHREGLLAIFKSGGIPALVKMLGSPVDSVLFYAITTLHNLLLHQEGAKMAVRLAGGLQKMVALLNKTNVKFLAITTDCLQILAYGNQESKLIILASGGPQALVNIMRTYTYEKLLWTTSRVLKVLSVCSSNKPAIVEAGGMQALGLHLTDPSQRLVQNCLWTLRNLSDAATKQEGMEGLLGTLVQLLGSDDINVVTCAAGILSNLTCNNYKNKMMVCQVGGIEALVRTVLRAGDREDITEPAICALRHLTSRHQEAEMAQNAVRLHYGLPVVVKLLHPPSHWPLIKATVGLIRNLALCPANHAPLREQGAIPRLVQLLVRAHQDTQRRTSMGGTQQQFVEGVRMEEIVEGCTGALHILARDVHNRIVIRGLNTIPLFVQLLYSPIENIQRVAAGVLCELAQDKEAAEAIEAEGATAPLTELLHSRNEGVATYAAAVLFRMSEDKPQDYKKRLSVELTSSLFRTEPMAWNETADLGLDIGAQGEALGYRQDDPIYRSFHSGGYGQDALGMDPMMEHEMGGHHPGADYPVDGLPDLGHAQDLMDGLPPGDSNQLAWFDTDL

SEQ ID NO: 830 - protein, 386 aa, mus musculus
MLLPRCCWGRWLMGRRPRCSCQAPAGFDGKDGRGSRVREKPPWRVLFLGTDHFARETLRALHAARDGKEEKLIEKLEVVTVPSLSPKGLPVKQYAIQSQLPVYEWPDVGSGEYDVGVVASFGRLLSEALILKFPYGILNVHPSCLPRWRGPAPIIHTVLHGDTVTGVTIMQIRPKRFDIGPILQQETIPVPPKSTSKELEAVLSKLGANMLISGLKNLPESLNNGRPQPAEGVTYAPKVSAGTSCVKWEEQTSEQVLRLHLAIGDIVPLQTLWMENTVKLLDLVEVNNSILADPKLTGQTVTPGFVVYHRPSQMLLVRCKDGWIGVRSVMLKKTLTATDFYNGYLHAWYQKNSHAHPSQCRFQTLRLPTKMQQKTKLLLCNSALSS

SEQ ID NO: 831 - protein, 509 aa, mus musculus
MSQRQVLQVFELYQNARTRFVQMVAEQATKPQNIETLQNAGIMSLLRPLLLDVVPTIQQTAALALGRLANYNDDLAEAVVKGDILPQLVYSLAEQNCVYKKAAAFVLRAVGKHSPQLAQATVDCGALDSLVICLEDFDPGVKEAAAWALAYIARHNAELSQAVVDAGAVPLLVLCIQEPETALKRIAASALSDISKHSPELAQTVVDVGAIAHLAQMILNPDEKLKQQVLSALSHIAKHSVDLAEMVVEAEIFPVVLTCLKDKDDFVKKNACTLIREIAKHTPELSQLIVNAGGVAAVIDCIGSCKGNIRLPGIMMLGYMAAHSENLAMAVIISKGVPQLSDCLSEEPEDHIKAAAAWALGQVGRHTPEHARAVAITNTLPVLLALYMSPESSEDLQVKSKKAIKNIIQKCTYLPALEPFLYDAPPNILKYVAGQFSKVLPHDSKARRLFVTSGGLKKIQEIKAEPGSILQEYINNINSCYPEEIVRYYSPGYSDILLQRIDSYQPLIN

SEQ ID NO: 832 - protein, 987 aa, mus musculus
MELRALLCWASLATALEETLLNTKLETADLKWVTYPQAEGQWEELSGLDEEQHSVRTYEVCDMKRPGGQAHWLRTGWVPRRGAVHVYATIRFTMMECLSLPRASRSCKETFTVFYYESEADTATAHTPAWMENPYIKVDTVAAEHLTRKRPGAEATGKVNIKTLRLGPLSKAGFYLAFQDQGACMALLSLHLFYKKCSWLITNLTYFPETVPRELVVPVAGSCVANAVPTANPSPSLYCREDGQWAEQQVTGCSCAPGYEAAESNKVCRACGQGTFKPQIGDESCLPCPANSHSNNIGSPVCLCRIGYYRARSDPRSSPCTTPPSAPRSVVHHLNGSTLRLEWSAPLESGGREDLTYAVRCRECRPEGSCLPCGGDMTFDPGPRDLVEPWVAIRGLRPDVTYTFEVAALNGVSTLATGPPPFEPVNVTTDREVPPAVSDIRVTRSSPSSLILSWAIPRAPSGAVLDYEVKYHEKGAEGPSSVRFLKTSENRAELRGLKRGASYLVQVRARSEAGYGPFGQEHHSQTQLDESESWREQLALIAGTAVVGVVLVLVVVIIAVLCLRKQSNGREVEYSDKHGQYLIGHGTKVYIDPFTYEDPNEAVREFAKEIDVSYVKIEEVIGAGEFGEVCRGRLKAPGKKESCVAIKTLKGGYTERQRREFLSEASIMGQFEHPNIIRLEGVVTNSVPVMILTEFMENGALDSFLRLNDGQFTVIQLVGMLRGIASGMRYLAEMSYVHRDLAARNILVNSNLVCKVSDFGLSRFLEENSSDPTYTSSLGGKIPIRWTAPEAIAFRKFTSASDAWSYGIVMWEVMSFGERPYWDMSNQDVINAIEQDYRLPPPPDCPTSLHQLMLDCWQKDRNARPRFPQVVSALDKMIRNPASLKIVARENGGASHPLLDQRQPHYSAFGSVGEWLRAIKMGRYEESFAAAGFGSFEVVSQISAEDLLRIGVTLAGHQKKILASVQHMKSQAKPGAPGGTGGPAQQF

SEQ ID NO: 833 - protein, 112 aa, mus musculus
MDLQNLTLPSQKLSPKPMTEINDLKANNRFAIVDSTRQAGVGLLTYPSQPTGTLLKTRSHPPLNNQPFLCNPISQAQTILPELRFWFFVFLKVEREKKWAGRPTHLERTEDC

SEQ ID NO: 834 - protein, 147 aa, mus musculus
ESSNTTIEDEDVKARKQEIIKVTEQLIEAINNGDFEAYTKICDPGLTAFEPEALGNLVEGMDFHRFYFENALSKSNKPIHTIILNPHVHLVGDDAACIAYIRLTQYMDGSGMPKTMQSEETRVWHRRDGKWQNVHFHRSGSPTVPIN

SEQ ID NO: 835 - protein, 262 aa, mus musculus
MARGPKKHLKRVAAPRHWMLDKLTGVFAPRPSAGPHRLRECLPLAIFLRNRLKYALTGDEVKKICMQRLIKVDGKVRTDVAYPAGFMDVISIDKSGENFRLVYDTKGRFAVHRITPEEAKYKLCKVRKVFVGTKGIPHLVTHDARTIRYPDPLIKVNDTVQISLDSGKITDAIKFDTGNLCMVTGGANLGRIGVITNRERHPGSFDVVHVKDANGNGFATRLSNIFVIGKGNKPWISLPRGKGIRLTIAEERDKRLAAKQSG

SEQ ID NO: 836 - protein, 742 aa, mus musculus
VCMAAFSEMGVMPEIAQAVEEMDWLLPTDIQAESIPLILGGGDVLMAAETGSGKTGAFSIPVIQIVYETLKDQQEGKKGKTTIKTGASVLNKWQMNPYDRGSAFAIGSDGLCCQSREVKEWHGCRGTRGLLKGKHYYEVSCHDQGLCRVGWSTMQASLDQGTDKFGFGFGGTGKKSHNKQFDNYGEEFTMHDTIGCYLDIDKGHVKFSKNGKDLGLAFEIPAHIKNQALFPACVLKNAELKFNFGEEEFKFPPKDGFVALSKAPDNYIVKSQHTGNAQVSQTKFLPNAPKALIVEPSRELAEQTLNNVKQFKKYIDNPKLRELLIIGGVAARDQLSVLDNGVDIVVGTPGRLDDLVSTGKLNLSQVRFLVLDEADGLLSQGYSDFINRMHNQIPQITCDGKRLQVIVCSATLHSFDVKKLSEKIMHFPTWVDLKGEDSVPDTVHHVVVPVNPKTDKLWERLGKNHIRTDDVHAKDNTRPGANSPEMWSEAIKILKGEYAVRAIKEHKMDQAIIFCRTKIDCDNLEQYFMQQGGGPDKKGHQFSCVCLHGDRKPHERKQNLERFKKGDVRFLICTDVAARGVDIHGVPYVINVTLPDEKQNYVHRIGRVGRAERMGLAISLVATEKEKVWYHVCSNRGKGCYNTRLKEDGGCTIWYNEMQLLSEIEEHLNCTISQVEPDIKVPVDEFDGKVTYGQKRAAGGGNYKGHVDVLAPTVQELAALEKEAQTSFLHLGYLPNQLFRTF

SEQ ID NO: 837 - protein, 271 aa, mus musculus
MAAKVFESIGKFGLALAVAGGVVSSALYNVDAGHRAVIFDRFHGVQDIVVGEGTHFLIPWVQKPVIFDCRSQPRNIPVITGSKDLQNVNITLRILFRPVASQLPHIYTNIGQDYDERVLPSITSEILKSVVARFDAGELITQRELVSRQVSDDLTERAATFGLILDDVSLTHLTFGKEFTEAVEAKQVAQQEAETARFVVEKAEQQKVAAIISAEGDAKAAELIANSLATAGDGLIELRKLEAAEDIAYQLSRSQNVTYLPVGQTVPLKLP

SEQ ID NO: 838 - protein, 91 aa, mus musculus
PTHPIRLGLALNFSVFYYEILNSPDRACRLAKAAFDDAIAELDTLSEESYKDSTLIMQLLRDNLTLWTSDMQGDGEEQNKEALQDVEDEDQ

SEQ ID NO: 839 - protein, 303 aa, mus musculus
MTDDQDCAAELEKVDSSSEDGVDAKPDRSSIISSILLKKKRNASAGPVRTGRDRVPTYLYRMDFQKMGKCIIINNKNFDKATGMDVRNGTDKDAGALFKCFQNLGFEVTVHNDCSCAKMQDLLRKASEEDHSNSACFACVLLSHGEEDLIYGKDGVTPIKDLTAHFRGDRCKTLLEKPKLFFIQACRGTELDDGIQADSGPINDIDANPRNKIPVEADFLFAYSTVPGYYSWRNPGKGSWFVQALCSILNEHGKDLEIMQILTRVNDRVARHFESQSDDPRFNEKKQIPCMVSMLTKELYFSR

SEQ ID NO: 840 - protein, 434 aa, mus musculus
MAMQKIFAREILDSRGNPTVEVDLHTAKGRFRAAVPSGASTGIYEALELRDGDKARYLGKGVLKAVEHINKTLGPALLEKKLSVVDQEKVDKFMIELDGTENKSKFGANAILGVSLAVCKAGAAEKGVPLYRHIADLAGNPDLALPVPAFNVINGGSHAGNKLAMQEFMILPVGASSFKEAMRIGAEVYHHLKGVIKAKYGKDATNVGDEGGFAPNILENNEALELLKTAIQAAGYPDKVVIGMDVAASEFYRNGKYDLDFKSPDDPARHISGEKLGELYKNFIQNYPVVSIEDPFDQDDWATWTSFLSGVDIQIVGDDLTVTNPKRIAQAVEEKACNCLLLKVNQIGSVTESIQACKLAQSNGWGVMVSHRSGETEDTFIADLVVGLCTGQIKTGAPCRSERLAKYNQLMRIEEALGDKAVFAGRKFRNPKAK

SEQ ID NO: 841 - protein, 184 aa, mus musculus
MREYKLVVLGSGGVGKSALTVQFVQGIFVEKYDPTIEDSYRKQVEVDAQQCMLEILDTAGTEQFTAMRDLYMKNGQGFALVYSITAQSTFNDLQDLREQILRVKDTDDVPMILVGNKCDLEDERVVGKEQGQNLARQWNNCAFLESSAKSKINVNEIFYDLVRQINRKTPVPGKARKKSSCQLL

SEQ ID NO: 842 - protein, 219 aa, mus musculus
MASASEPPASPRDAADQNFDYMFKLLLIGNSSVGKTSFLFRYADDSFTPAFVSTVGIDFKVKTVYRHDKRIKLQIWDTAGQERYRTITTAYYRGAMGFLLMYDIANQESFTAVQDWATQIKTYSWDNAQVILVGNKCDLEDERVVPAEDGRRLADDLGFEFFEASAKENINVKQVFERLVDIICDKMNESLEPSSSPGSNGKGPALGDTPPPQPSSCSC

SEQ ID NO: 843 - protein, 354 aa, mus musculus
MGCTLSAEERAALERSKAIEKNLKEDGISAAKDVKLLLLGAGESGKSTIVKQMKIIHEDGFSGEDVKQYKPVVYSNTIQSLAAIVRAMDTLGVEYGDKERKTDSKMVCDVVSRMEDTEPFSAELLSAMMRLWGDSGIQECFNRSREYQLNDSAKYYLDSLDRIGAGDYQPTEQDILRTRVKTTGIVETHFTFKNLHFRLFDVGGQRSERKKWIHCFEDVTAIIFCVALSGYDQVLHEDETTNRMHESLMLFDSICNNKFFIDTSIILFLNKKDLFGEKIKKSPLTICFPEYPGSNTYEDAAAYIQTQFESKNRSPNKEIYCHMTCATDTNNIQVVFDAVTDIIIANNLRGCGLY

SEQ ID NO: 844 - protein, 115 aa, mus musculus
MPMFIVNTNVPRASVPEGFLSELTQQLAQATGKPAQYIAVHVVPDQLMTFSGTNDPCALCSLHSIGKIGGAQNRNYSKLLCGLLSDRLHISPDRVYINYYDMNAANVGWNGSTFA

SEQ ID NO: 845 - protein, 593 aa, mus musculus
MASSTPSPATSSNAGADPNTTNLRPTTYDTWCGVAHGCTRKLGLKICGFLQRTNSLEEKSRLVSAFRERQSSKNLLSCENSDQGARFRRTETDFSNLFAQDLLPAKNGEEQTAQFLLEVVDILLNYVRKTFDRSTKVLDFHHPHQLLEGMEGFNLELSDHPESLEQILVDCRDTLKYGVRTGHPRFFNQLSTGLDIIGLAGEWLTSTANTNMFTYEIAPVFVLMEQITLKKMREIVGWSNKDGDGIFSPGGAISNMYSIMAARYKYFPEVKTKGMAAVPKLVLFTSEHSHYSIKKAGAALGFGTDNVILIKCNERGKIIPADLEAKILDAKQKGYVPLYVNATAGTTVYGAFDPIQEIADICEKYNLWLHVDAAWGGGLLMSRKHRHKLSGIERANSVTWNPHKMMGVLLQCSAILVKEKGILQGCNQMCAGYLFQPDKQYDVSYDTGDKAIQCGRHVDIFKFWLMWKAKGTVGFENQINKCLELADYLYAKIKNREEFEMVFDGEPEHTNVCFWYIPQSLRGVPDSPERREKLHRVAPKIKALMMESGTTMVGYQPQGDKANFFRMVISNPAATQSDIDFLIEEIERLGQDL

SEQ ID NO: 846 - protein, 233 aa, mus musculus
DPRVRQGIVKECPPTETEERNRIAAAIFYSISLTQQGLQGVELGTFLIKRVVKELQKEFPQLGAFSSLSPIPGFTKWLLGLLNVQGKEHGRNELFTDSECQEISAVTGNPVHESLKGFLSSGEWVKSEKLTQALQGPLMRLCAWYLYGEKHRGYALNPVANFHLQNGAVMWRINWMADSSLKGLTSSCGLMVNYRYYLEETGPNSISYLGSKNIKASEQILSLVAQFQNNSKL

SEQ ID NO: 847 - protein, 1639 aa, mus musculus
AARIHRRRARHGARVSARRSRPPDDMETAPTRAPPPPPPPLLLLVLYCSLVPAAASPLLLFANRRDVRLVDAGGVKLESTIVASGLEDAAAVDFQFSKGAVYWTDVSEEAIKQTYLNQTGAAAQNIVISGLVSPDGLACDWVGKKLYWTDSETNRIEVANLNGTSRKVLFWQDLDQPRAIALDPAHGYMYWTDWGEAPRIERAGMDGSTRKIIVDSDIYWPNGLTIDLEEQKLYWADAKLSFIHRANLDGSFRQKVVEGSLTHPFALTLSGDTLYWTDWQTRSIHACNKWTGEQRKEILSALYSPMDIQVLSQERQPPFHTPCEEDNGGCSHLCLLSPREPFYSCACPTGVQLQDNGKTCKTGAEEVLLLARRTDLRRISLDTPDFTDIVLQVGDIRHAIAIDYDPLEGYVYWTDDEVRAIRRAYLDGSGAQTLVNTEINDPDGIAVDWVARNLYWTDTGTDRIEVTRLNGTSRKILVSEDLDEPRAIVLHPVMGLMYWTDWGENPKIECANLDGRDRHVLVNTSLGWPNGLALDLQEGKLYWGDAKTDKIEVINIDGTKRKTLLEDKLPHIFGFTLLGDFIYWTDWQRRSIERVHKVKASRDVIIDQLPDLMGLKAVNVAKVVGTNPCADGNGGCSHLCFFTPRATKCGCPIGLELLSDMKTCIIPEAFLVFTSRATIHRISLETNNNDVAIPLTGVKEASALDFDVSNNHIYWTDVSLKTISRAFMNGSSVEHVIEFGLDYPEGMAVDWMGKNLYWADTGTNRIEVARLDGQFRQVLVWRDLDNPRSLALDPTKGYIYWTEWGGKPRIVRAFMDGTNCMTLVDKVGRANDLTIDYADQRLYWTDLDTNMIESSNMLGQERMVIADDLPYPFGLTQYSDYIYWTDWNLHSIERADKTSGRNRTLIQGHLDFVMDILVFHSSRQDGLNDCVHSNGQCGQLCLAIPGGHRCGCASHYTLDPSSRNCSPPSTFLLFSQKFAISRMIPDDQLSPDLVLPLHGLRNVKAINYDPLDKFIYWVDGRQNIKRAKDDGTQPSMLTSPSQSLSPDRQPHDLSIDIYSRTLFWTCEATNTINVHRLDGDAMGVVLRGDRDKPRAIAVNAERGYMYFTNMQDHAAKIERASLDGTEREVLFTTGLIRPVALVVDNALGKLFWVDADLKRIESCDLSGANRLTLEDANIVQPVGLTVLGRHLYWIDRQQQMIERVEKTTGDKRTRVQGRVTHLTGIHAVEEVSLEEFSAHPCARDNGGCSHICIAKGDGTPRCSCPVHLVLLQNLLTCGEPPTCSPDQFACTTGEIDCIPGAWRCDGFPECADQSDEEGCPVCSASQFPCARGQCVDLRLRCDGEADCQDRSDEANCDAVCLPNQFRCTSGQCVLIKQQCDSFPDCADGSDELMCEINKPPSDDIPAHSSAIGPVIGIILSLFVMGGVYFVCQRVMCQRYTGASGPFPHEYVGGAPHVPLNFIAPGGSQHGPFPGIPCSKSVMSSMSLVGGRGSVPLYDRNHVTGASSSSSSSTKATLYPPILNPPPSPATDPSLYNVDVFYSSGIPATARPYRPYVIRGMAPPTTPCSTDVCDSDYSISRWKSSKYYLDLNSDSDPYPPPPTPHSQYLSAEDSCPPSPGTERSYCHLFPPPPSPCTDSS

SEQ ID NO: 848 - protein, 287 aa, mus musculus
KDRTQELRTAKDSDDDDDVTVTVDRDRFMDEFFEQVEEIRGFIDKIAENVEEVKRKHSAILASPNPDEKTKEELEELMSDIKKTANKVRSKLKSIEQSIEQEEGLNRSSADLRIRKTQHSTLSRKFVEVMSEYNATQSDYRERCKGRIQRQLEITGRTTTSEELEDMLESGNPAIFASGIIMDSSISKQALSEIETRHSEIIKLETSIRELHDMFMDMAMLVESQGEMIDRIEYNVEHAVDYVERAVSDTKKAVKYQSKARRKKIMIIICCVILGIIIASTIGGIFG

SEQ ID NO: 849 - protein, 281 aa, mus musculus
AWTTALEFCKRTGGLCSSGGRCGACLPFSVSLSHAAGQSGLGKSTLVNTLFKSQVSRKASSWNREEKIPKTVEIKAIGHVIEEGGVKMKLTVIDTPGFGDQINNENCWEPIEKYINEQYEKFLKEEVNIARKKRIPDTRVHCCLYFISPTGHSLRPLDLEFMKHLSKVVNIIPVIAKADTMTLEEKSEFKQRVRKELEVNGIEFYPQKEFDEDLEDKTENDKIRQESMPFAVVGSDKEYQVNGKRVLGRKTPWGIIEGNPAHLPEGQAARRNRTDRRKEQL

SEQ ID NO: 850 - protein, 1290 aa, mus musculus
CGQAAETVKMTTTVATDYDNIEIQQQYSDVNNRWDVDDWDNENSSARLFERSRIKALADEREAVQKKTFTKWVNSHLARVSCRITDLYTDLRDGRMLIKLLEVLSGERLPKPTKGRMRIHCLENVDKALQFLKEQRVHLENMGSHDIVDGNHRLTLGLIWTIILRFQIQDISVETEDNKEKKSAKDALLLWCQMKTAGYPNVNIHNFTTSWRDGMAFNALIHKHRPDLIDFDKLKKSNAHYNLQNAFNLAEQHLGLTKLLDPEDISVDHPDEKSIITYVVTYYHYFSKMKALAVEGKRIGKVLDNAIETEKMIEKYESLASDLLEWIEQTIIILNNRKFANSLVGVQQQLQAFNTYRTVEKPPKFTEKGNLEVLLFTIQSKMRANNQKVYMPREGKLISDINKAWERLEKAEHERELALRNELIRQEKLEQLARRFDRKAAMRETWLSENQRLVSQDNFGFDLPAVEAATKKHEAIETDIAAYEERVQAVMAVARELEAENYHDIKRITARKDNVIRLWEYLLELLRARRQRLEMNLGLQKIFQEMLYIMDWMDEMKVLLLSQDYGKHLLGVEDLLQKHALVEADIAIQAERVRGVNASAQKFATDGEGYKPCDPQVIRDRVAHMEFCYQELCQLAAERRARLEESRRLWKFFWEMAEEEGWIREKEKILSSDDYGKDLTSVMRLLSKHRAFEDEMSGRSGHFEQAIKEGEDMIAEEHFGSEKIRERIIYIREQWANLEQLSAIRKKRLEEASLLHQFQADADDIDAWMLDILKIVSSNDVGHDEYSTQSLVKKHKDVAEEITNYRPTIDTLHEQASALPQAHAESPDVKGRLAGIEERCKEMAELTRLRKQALQDTLALYKMFSEADACELWIDEKEQWLNNMQIPEKLEDLEVIQHRFESLEPEMNNQASRVAVVNQIARQLMHNGHPSEKEIRAQQDKLNTRWSQFRELVDRKKDALLSALSIQNYHLECNETKSWIREKTKVIESTQDLGNDLAGVMALQRKLTGMERDLVAIEAKLSDLQKEAEKLESEHPDQAQAILSRLAEISDVWEEMKTTLKNREASLGEASKLQQFLRDLDDFQSWLSRTQTAIASEDMPNTLTEAEKLLTQHENIKNEIDNYEEDYQKMRDMGEMVTQGQTDAQYMFLRQRLQALDTGWNELHKMWENRQNLLSQSHAYQQFLRDTKQAEAFLNNQEYVLAHTEMPTTLEGAEAAIKKQEDFMTTMDANEEKINAVVETGRRLVSDGNINSDRIQEKVDSIDDRHRKNREAASELLMRLKDNRDLQKFL

SEQ ID NO: 851 - protein, 487 aa, mus musculus
KIRATNRRGPGPHSKAFIVAIPTTSSTEASAQPNGRDSSRKPEKLQQPSSPAPKVAASSEHTPSAKNVKDALSDLNKIRTNGVVPGKTQLHSKMGELDPQSTEVTGKEELDSLEDPRSSRLETLNQKQPLRVPSRSGHGVLAPGRTPARTGLPVLPRKEVMDRRGPSLDPHLRPRVEPSASSAYHQLSSIDNDSVDQNEYDQAGSPDPKAVSSPSSPKNPARSRLTSVPSRHAASNMLRDKSRMQPGTKASSSSASSQSHSSTSEEDSSAAAQPRSHSLLQGGSSRPALSRDRQDVHASSSRMPSQTVSSSRPSALTEGSEEEDTSDGGADIDRVAGDTRRRAEATAQIQQTRPALGHFSLIRNKPFPAHSRNPSRFPKLRGPRLQPSRSPQSTSASKVLTRAPSLPASHTRPGSDVYGDGEDEEPLPATVVNDRTPSSSSHPISGGSDTLRRGSQRGASLYRKEPIPENSKAAGADVHPGGKSPLS

SEQ ID NO: 852 - protein, 761 aa, mus musculus
MSRKGPRAEVCADCSAPDPGWASISRGVLVCDECCSVHRSLGRHISIVKHLRHSAWPPTLLQMVHTLASNGANSIWEHSLLDPAQVQSGRRKANPQDKVHPIKSEFIRAKYQMLAFVHKLPCRDDDGVTAKDLSKQLHSSVRTGNLETCLRLLSLGAQANFFHPEKGTTPLHVAAKAGQTLQAELLVVYGADPGSPDVNGRTPIDYARQAGHHELAERLVECQYELTDRLAFYLCGRKPDHKNGHYIIPQMADSLDLSELAKAAKKKLQALSNRLFEELAMDVYDEVDRRENDAVWLATQNHSTLVTERSAVPFLPVNPEYSATRNQGRQKLARFNAREFATLIIDILSEAKRRQQGKSLSSPTDNLELSARSQSELDDQHDYDSVASDEDTDQEPLPSAGATRNNRARSMDSSDLSDGAVTLQEYLELKKALATSEAKVQQLMKVNSSLSDELRRLQREIHKLQAENLQLRQPPGPVPPPSLPSERAEHTLMGPGGSTHRRDRQAFSMYEPGSALKPFGGTPGDELATRLQPFHSTELEDDAIYSVHVPAGLYRIRKGVSASSVPFTPSSPLLSCSQEGSRHASKLSRHGSGADSDYENTQSGDPLLGLEGKRFLELSKEDELHPELESLDGDLDPGLPSTEDVILKTEQVTKNIQELLRAAQEFKHDSFVPCSEKIHLAVTEMASLFPKRPALEPVRSSLRLLNASAYRLQSECRKTVPPEPGAPVDFQLLTQQVIQCAYDIAKAAKQLVTITTREKKQ

SEQ ID NO: 853 - protein, 152 aa, mus musculus
MANSERTFIAIKPDGVQRGLVGEIIKRFEQKGFRLVGLKFLQASEDLLKEHYTDLKDRPFFTGLVKYMHSGPVVAMVWEGLNVVKTGRVMLGETNPADSKPGTIRGDFCIQVGRNIIHGSDSVKSAEKEISLWFQPEELVEYKSCAQNWIYE

SEQ ID NO: 854 - protein, 207 aa, mus musculus
MAAKVFESIGKFGLALAVAGGVVNSALYNVDAGHRAVIFDRFRGVQDIVVGEGTHFLIPWVQKPIIFDCRSRPRNVPVITGSKDLQNVNITLRILFRPVASQLPRIYTSIGEDYDERVLPSITTEILKSVVARFDAGELITQRELVSRQVSDDLTERAATFGLILDDVSLTHLTFGKEFTEAVEAKQVAQQEAERARFVVEKAEQQK

SEQ ID NO: 855 - protein, 255 aa, mus musculus
MDDREDLVYQAKLAEQAERYDEMVESMKKVAGMDVELTVEERNLLSVAYKNVIGARRASWRIISSIEQKEENKGGEDKLKMIREYRQMVETELKLICCDILDVLDKHLIPAANTGESKVFYYKMKGDYHRYLAEFATGNDRKEAAENSLVAYKAASDIAMTELPPTHPIRLGLALNFSVFYYEILNSPDRACRLAKAAFDDAIAELDTLSEESYKDSTLIMQLLRDNLTLWTSDMQGDGEEQNKEALQDVEDENQ

SEQ ID NO: 856 - protein, 518 aa, mus musculus
MATTVTCTRFTDEYQLYEDIGKGAFSVVRRCVKLCTGHEYAAKIINTKKLSARDHQKLEREARICRLLKHSNIVRLHDSISEEGFHYLVFDLVTGGELFEDIVAREYYSEADASHCIQQILEAVLHCHQMGVVHRDLKPENLLLASKCKGAAVKLADFGLAIEVQGDQQAWFGFAGTPGYLSPEVLRKEAYGKPVDIWACGVILYILLVGYPPFWDEDQHKLYQQIKAGAYDFPSPEWDTVTPEAKNLINQMLTINPAKRITAHEALKHPWVCQRSTVASMMHRQETVECLKKFNARRKLKGAILTTMLATRNFSAAKSLLNKKADGVKPQTNSTKNSSAITSPKGSLPPAALEPQTTVIHNPVDGIKESSDSTNTTIEDEDAKARKQEIIKTTEQLIEAVNNGDFEAYAKICDPGLTSFEPEALGNLVEGMDFHRFYFENLLAKNSKPIHTTILNPHVHVIGEDAACIAYIRLTQYIDGQGRPRTSQSEETRVWHRRDGKWQNVHFHCSGAPVAPLQ

SEQ ID NO: 857 - protein, 394 aa, mus musculus
MDSQGRKVVVCDNGTGFVKCGYAGSNFPEHIFPALVGRPIIRSTTKVGNIEIKDLMVGDEASELRSMLEVNYPMENGIVRNWDDMKHLWDYTFGPEKLNIDTRNCKILLTEPPMNPTKNREKIVEVMFETYQFSGVYVAIQAVLTLYAQGLLTGVVVDSGDGVTHICPVYEGFSLPHLTRRLDIAGRDITRYLIKLLLLRGYAFNHSADFETVRMIKEKLCYVGYNIEQEQKLALETTVLVESYTLPDGRIIKVGGERFEAPEALFQPHLINVEGVGVAELLFNTIQAADIDTRSEFYKHIVLSGGSTMYPGLPSRLERELKQLYLERVLKGDVEKLSKFKIRIEDPPRRKHMVFLGGAVLADIMKDKDNFWMTRQEYQEKGVRVLEKLGVTVR

SEQ ID NO: 858 - protein, 325 aa, mus musculus
  misc_feature (110)..(110): Xaa can be any naturally occurring amino acid
  misc_feature (322)..(322): Xaa can be any naturally occurring amino acid
PRGPPGSAGSPGKDGLNGLPGPIGPPGPRGRTGDSGPAGTPGPPGPPGPPGPPSGGYDFSFLPQPPQEKSQDGDRYYRADDANVVRDRDLAVDATLKSLSQQIENIRSPXSSRKNPARTCRDLKMCHSDWKSGEYWIDPNQGCNLDAIKVYCNMETGQTCVFPTQPSVPQKNWYISPNPKEKKHVWFGESMTDGFPFEYGSEGSDPTDVAIQLTFLRLMSTEASQNITYHCKNSVAYMDQQTGNLKKALLLQGSNEIELRGEGNSRFTYSRVVDGCTSHTGTWGKTVIEYKTTKTSRLPIIDVAPLDIGAPDQEFGLDIGPXCFV

SEQ ID NO: 859 - protein, 1803 aa, mus musculus
ELSEIEPNVFLRPFLEVIRSEDTTGPITGLALTSVNKFLSYALIDPTHEGTAEGMENMADAVTHARFVGTDPASDEVVLMKILQVLRTLLLTPVGTHLTNESVCEIMQSCFRICFEMRLSELLRKSAEHTLVDMVQLLFTRLPQFKEEPKSYVGTNMKKLKMRAGGMSDSSKWKKQKRSPRPPRHTTKVTPGSELPTPNGATLPSNLTGGVPFIDAPTSISSASSEAASTVVSPCTDSGLELSSQTTSKEDLTDLEQAGSPREITTSEPGSSEMGASDQLDPQEGAHVEKAQSASVESIPEVLEECTSPADHSDSASVHDMDYVNPRGVRFTQSSQKEGTALVPYGLPCIRELFRFLISLTNPHDRHNSEVMIHMGLHLLTVALESAPVAQCQTLLGLIKDEMCRHLFQLLSVERLNLYAASLRVCFLLFESMREHLKFQLEMYIKKLMEIITVENPKMPYEMKEMALEAVVQLWRIPSFVTELYINYDCDYYCSNLFEDLTKLLSKNAFPVSGQLYTTHLLSLDALLTVIDSTESHCQAKVLNTLNQQEKKETARPGFEAVDGNPETNKSERATSDGKSTGVALDARGLHFPSGGWLSTEHGKPGCRDLEEAGDSGADKKFTRKPPRFSCLLPDPRELIEIKNKKKLLITGTEQFNQKPKKGIQFLQEKGLLTIPMDNTEVAQWLRENPRLDKKMIGEFVSDRKNMDLLESFVSTFSFQGLRLDEALRLYLEAFRLPGEAPVIHRLLEVFTEHWRSCNGSPFANSDACFALAYAVIMLNTDQHNHNVRKQNAPMTLEEFRKNLKGVNGGKDFEQDILEDMYHAIKNEEIVMPEEQTGLVRENYVWSVLLHRGASPEGVFLRVPPGSYDLDLFTMTWGPTIAALSYVFDKSLEETIIQKAISGFRKCAMISAHYGLSDVFDNLIISLCKFTALSSESIENLPSVFGSNPKAHIAAKTVFHLAHRHGDILREGWKNIMEAMLQLFRAQLLPKAMVEVEDFVDPNGKISLQREETPSNRGESTVLSFVSWLTLSGPEQSSVRGPSTENQEAKRVALDCIKQCDPEKMITESKFLQLESLQELMKALVSVTPDEETYDEEDAAFCLEMLLRIVLENRDRVGCVWQTVRDHLYHLCVQAQDFCFLVERAVVGLLRLAIRLLRREEISGQVLLSLRILLLMKPSVLSRVSHQVAYGLHELLKTNAANIHSGDDWATLFTLLECIGSGVKPPDALQATARADAPDAGAQSDSELPSYHQNDVSLDRGYTSDSEVYTDHGRPGKIHRSATDADMVNSGWLVVGKDDIDNSKPGAGLSRPGPSPLVNQYSLTVGLDLGPHDTKSLLKCVESLSFIVRDAAHITPDNFELCVKTLRIFVEASLNGGCKSQDKRSKSHKYDSKGNRFKKKPKEGSMLRRPRGSNQHATRGGHSDEEEDEGVPASYHTVSLQLLDLMHTLHTRAASIYSSWAEEQRHLEGGGQKIEADSRTLWAHCWCPLLQGIACLCCDARRQVRMQALTYLQRALLVHDLQKLDALEWESCFNKVLFPLLTKLLENISPADVGGMEETRMRASTLLSKVFLQHLSPLLSLSTFAALWLTILDFMDKYMHAGSSDLLSEAIPESLKNMLLVMDTAEIFHSADARGGGPSALWEITWERIDCFLPHLRDELFKQTVIQDPMPAEPHSQKPLASTHLTSAAGDPRMPGHPPLPEIPSEMGVCDSEKPESTRAPSSSSPGSPMASSPSKLSPAQEGPPPLTQPPLILQPLTSPLQVGVPPMTLPIILNPALIEATSPVPLLATPRPTDPIPTSEVN

SEQ ID NO: 860 - protein, 227 aa, mus musculus
TAAMPGGLLLGDEAPNFEANTTIGRIRFHDFLGDSWGILFSHPRDFTPVCTTELGRAAKLAPEFAKRNVKLIALSIDSVEDHLAWSKDINAYNGETPTEKLPFPIIDDKGRDLAILLGMLDPVEKDANNMPVTARVVFIFGPDKKLKLSILYPATTGRNFDEILRVVDSLQLTGTKPVATPVDWKKGESVMVVPTLSEEEAKQCFPKGVFTKELPSGKKYLRYTPQP

SEQ ID NO: 861 - protein, 667 aa, mus musculus
ELPVPQELPVPQELPVPQELPVPQELPVPLEFQEVQQAQAVGWRAPKVPPHFWQPVSAQEAQEQATQIAHVEQQQPFQGAPASSKALQTQLPTHQAQASGLQAELPSVQLQPSWQGPLPMLQAQPGASATLANFPRGSTRSRMAPSGEPGPSSLEPRGPPRERRAPARDKKGPPKERMFIGATFCAPRGASASRAYVPTAWKNLPATSETFPATSRVFPSTSHFQPASSNAFRGPSAASESPKSLPFALQDPYACVEALPAVPWVPYPDGNASSACKSVPAILMVAAAAPQASATAAEASKSSEPPRRPGKATRKKKHLEPKEDNCGHRLSSRDWRGPRTWGNPSHSDWEIQRAMQLLGDRESLYTPQGLNDWGCPNTSRMPRSLEGPSTSRDQEFCGDSGGSQTWMASEVPSVSRGSSAAQEDPDRESQPLSPLDERANALVQFLLVKDQAKVPVQLSEMVNVVIREYKDDSLDIINRANTKLECTFGCQLKEVDTKTHTYIIVNKMAYPQCNLLASYLERPKFSLLMVVLSLIFMKGYCIRENLLFSFLFQLGLDVQETSGLFRITKKLITSVFVRHRYLEYRQIPFTEPAEYELLWGPRAFLETNRVHILRFLAALYENQPQIWSCQYLDSLAELEYKDANAAAEESHDSDDDAHDPTSSPHPH

SEQ ID NO: 862 - protein, 380 aa, mus musculus
PRVRFFRGHREAEFICVCDISKENKEVIQELNNCQVTVAHINATAKNAADDKLRQSLRRFANTHTAPATVVLVSTDVNFALELSDLRHRHGFHIILVHKNQASEALLHHANQLIRFEEFISDLPPRLPLKIPCHTLLYVYNLPANKDGKSISNRLRRLSDNCGGKVLSITGCSAILRFINQDSAERAQKRMENEDVFGNRIIVSFTPKHREFFEAKSSNAIADKVKSPKKVKNTKLCLIKDTSEQSPSVKAMPGKVLQANSGSATKTTNIKSLQELCRMESKSGNRNSDHQQGHGRLAALPNSGPTASVPIVKNTGVTEPLYRSSQKKENPSSQSTVNSPVEKKKREETVFQVSYPSAFSKLIASRQVSPLLTSQSWSPR

SEQ ID NO: 863 - protein, 757 aa, mus musculus
MMWPQPPTFSLFLLLLLSQAPSSRPQSSGTKKLRLVGPADRPEEGRLEVLHQGQWGTVCDDDFALQEATVACRQLGFESALTWAHSAKYGQGEGPIWLDNVRCLGTEKTLDQCGSNGWGISDCRHSEDVGVVCHPRRQHGYHSEKVSNALGPQGRRLEEVRLKPILASAKRHSPVTEGAVEVRYDGHWRQVCDQGWTMNNSRVVCGMLGFPSQTSVNSHYYRKVWNLKMKDPKSRLNSLTKKNSFWIHRVDCFGTEPHLAKCQVQVAPGRGRLRPACPGGMHAVVSCVAGPHFRRQKPKPTRKESHAEELKVRLRSGAQVGEGRVEVLMNRQWGTVCDHRWNLISASVVCRQLGFGSAREALFGAQLGQGLGPIHLSEVRCRGYERTLGDCLALEGSQNGCQHANDAAVRCNIPDMGFQNKVRLAGGRNSEEGVVEVQVEVNGVPRWGTVCSDHWGLTEAMVTCRQLGLGFANFALKDTWYWQGTPEAKEVVMSGVRCSGTEMALQQCQRHGPVHCSHGPGRFSAGVACMNSAPDLVMNAQLVQETAYLEDRPLSMLYCAHEENCLSKSADHMDWSYGYRRLLRFSSQIYNLGRADFRPKAGRHSWIWHQCHRHYHSIEVFTHYDLLTLNGSKVAEGHKASFCLEDTNCPSGVQRRYACANFGEQGVAVGCWDTYRHDIDCQWVDITDVGPGDYIFQVVVNPTNDVAESDFSNNMIRCRCKYDGQRVWLHNCHTGDSYRANAELSLEQEQRLRNNLI

SEQ ID NO: 864 - protein, 119 aa, mus musculus
PVSRLPVGDHLIYSETEPVRTLLPDEKKEGKQPALPMSNLHEATMPVLFDHLRETRADKKRLRKALREFEEQFFKQTGRSPQKEDRMPMADEYCEYKHIKAKLRLLGVLISKQDVAKTI

SEQ ID NO: 865 - protein, 988 aa, mus musculus
MPGGKRGLVAPQNTFLENIVRRSSESSFLLGNAQIVDWPVVYSNDGLCKLSGYHRADVMQKSSTCSFMYGELTDKKTIEKVRQTFDNYESNCFEVLLYKKNRTPVWFYMQIAPIRNEHEKVVLFLCTFKDITLFKQPIEDDSTKGWTKFARLTRALTNSRSVLQQLTPMNKTETVHKHSRLAEVLQLGSDILPQYKQEAPKTPPHIILHYCAFKTTWDWVILILTFYTAIMVPYNVSFKTKQNNIAWLVLDSVVDVIFLVDIVLNFHTTFVGPGGEVISDPKLIRMDYLKTWFVIDLLSCLPYDIINAFENVDEGISSLFSSLKVVRLLRLGRVARKLDHYLEYGAAVLVLLVCVFGLVAHWLACIWYSIGDYEVIDEVTNTIQIDSWLYQLALSIGTPYRYNTSAGIWEGGPSKDSLYVSSLYFTMTSLTTIGFGNIAPTTDVEKMFSVAMMMVGSLLYATIFGNVTTIFQQMYANTNRYHEMLNNVRDFLKLYQVPKGLSERVMDYIVSTWSMSKGIDTEKVLSICPKDMRADICVHLNRKVFNEHPAFRLASDGCLRALAVEFQTIHCAPGDLIYHAGESVDALCFVVSGSLEVIQDEEVVAILGKGDVFGDIFWKETTLAHACANVRALTYCDLHIIKREALLKVLDFYTAFANSFSRNLTLTCNLRKRIIFRKISDVKKEEEERLRQKNEVTLSIPVDHPVRKLFQKFKQQKELRIQGSAQSDPERSQLQVESRPLQNGASITGTSVVTVSQITPIQTSLAYVKTSESLKQNNRDAMELKPDGGAEPKCLKVNSPIRMKNGNGKGWLRLKNNMGAQEEKKEDWNNVTKAESMGLLSEDPKGSDSENSVTKNPLRKTDSCDSGITKSDLRLDKAGEARSPLEHSPSQADVKHSFYPIPEQALQTTLQEVKHELKEDIQLLSCRMTALEKQVAEILKLLSEKSVPQTSSPKPQIPLQVPPQIPCQDIFSVSRPESPESDKDEINF

SEQ ID NO: 866 - protein, 477 aa, mus musculus
MAEMGSKGVTAGKIASNVQKKLTRAQEKVLQKLGKADETKDEQFEQCVQNFNKQLTEGTRLQKDLRTYLASVKAMHEASKKLSECLQEVYEPEWPGRDEANKIAENNDLLWMDYHQKLVDQALLTMDTYLGQFPDIKSRIAKRGRKLVDYDSARHHYESLQTAKKKDEAKIAKAEEELIKAQKVFEEMNVDLQEELPSLWNSRVGFYVNTFQSIAGLEENFHKEMSKLNQNLNDVLVSLEKQHGSNTFTVKAQPSDNAPEKGNKSPSPPPDGSPAATPEIRVNHEPEPASGASPGATIPKSPSQLRKGPPVPPPPKHTPSKEMKQEQILSLFDDAFVPEISVTTPSQPAEASEVVGGAQEPGETAASEATSSSLPAVVVETFSATVNGAVEGSAGTGRLDLPPGFMFKVQAQHDYTATDTDELQLKAGDVVLVIPFQNPEEQDEGWLMGVKESDWNQHKELEKCRGVFPENFTERVQ

SEQ ID NO: 867 - protein, 1068 aa, mus musculus
MNSIKNVPARVLSRRPGHSLEAEREQFDKTQAISISKAINSQEAPVKEKHARRIILGTHHEKGAFTFWSYAIGLPLSSSSILSWKFCHVLHKVLRDGHPNVLHDYQRYRSNIREIGDLWGHLRDQYGHLVNIYTKLLLTKISFHLKHPQFPAGLEVTDEVLEKAAGTDVNNIFQLTVEMFDYMDCELKLSESVFRQLNTAIAVSQMSSGQCRLAPLIQVIQDCSHLYHYTVKLMFKLHSCLPADTLQGHRDRFHEQFHSLKNFFRRASDMLYFKRLIQIPRLPEGPPNFLRASALAEHIKPVVVIPEEAPEEEEPENLIEISSAPPAGEPVVVADLFDQTFGPPNGSMKDDRDLQIENLKREVETLRAELEKIKMEAQRYISQLKGQVNGLEAELEEQRKQKQKALVDNEQLRHELAQLKALQLEGARNQGLREEAERKASATEARYSKLKEKHSELINTHAELLRKNADTAKQLTVTQQSQEEVARVKEQLAFQMEQAKRESEMKMEEQSDQLEKLKRELAARAGELARAQEALSRTEQSGSELSSRLDTLNAEKEALSGVVRQREAELLAAQSLVREKEEALSQEQQRSSQEKGELRGQLAEKESQEQGLRQKLLDEQLAVLRSAAAEAEAILQDAVSKLDDPLHLRCTSSPDYLVSRAQAALDSVSGLEQGHTQYLASSEDASALVAALTRFSHLAADTIVNGAATSHLAPTDPADRLMDTCRECGARALELVGQLQDQTVLPRAQPSLMRAPLQGILQLGQDLKPKSLDVRQEELGAMVDKEMAATSAAIEDAVRRIEDMMSQARHESSGVKLEVNERILNSCTDLMKAIRLLVMTSTSLQKEIVESGRGAATQQEFYAKNSRWTEGLISASKAVGWGATQLVESADKVVLHMGKYEELIVCSHEIAASTAQLVAASKVKANKNSPHLSRLQECSRTVNERAAYVVASTKSGQEQIEDRDTMDFSGLSLIKLKKQEMETQVRVLELEKTLEAERVRLGELRKQHYVLAGGMGTPSEEEPSRPSPAPRSGATKKPPLAQKPSIAPRTDNQLDKKDGVYPAQLVNY

SEQ ID NO: 868 - protein, 265 aa, mus musculus
RHHKVWRKCKMRIFTVAQMDDNSIQMKKDLTTFLYHLRITAEVEVVEMHESDISAYTYEKTLVMEQRSQILKQMHLTKNEREREIQSITDESRGSIRRKNPANPRLRLNVPEETACDNEEKPEEEVQLIHDQSAPSCPSSSPSPGEEPEGERETDPEVHLTWTKDKSVAEKNKGPSPVSSEGIKDFFSMKPNQSNVRRMHTAVRLNEVIVNKSRDAKLVLLNMPGPPRNRNGDENYMEFLEVLTEQLDRVMLVRGGGREVITIYS

SEQ ID NO: 869 - protein, 619 aa, mus musculus
MTQPQMAPICLVENHNEQLLVNQEAIEILEKISQPVVVVAIVGLYRTGKSYLMNCLAGQNHGFPLGSTVQSQTKGIWMWCMPHPTKPEHTLVLLDTEGLGDVEKSNPKNDSWIFALSVLLSSTFVYNSMSTINHQALEQLHYVTELTELIRSKSSRNPHGIKNSTEFVSFFPDFVWTVRDFMLELKLNGEDITSDEYLENALKLIPGYNPRVQASNSARECIRCFFPNRKCFVFDRPTHDRELLQKLETISEDQLDLKFREGTKAFVSYVFTYAKIKTLREGIKVTGNRLGTLVTTYVDAINSGAVPCLDDAMTSVAQRENSVAVQKAADHYSEQMAQRLRLPTDTLQELLDVHAACEKEAMAVFMEHSFKDENQQFLKKLVEIISEKIAFFWLKNEEASNKYCQEELDRLSKDFMDNISTFSVPGGHRIYMDMREKIEHDYWQVPRKGVKACEVFQNFLQSQYIIESSILQADRALTAGEKAIAEERAQKEVAEKEQELLRQKQKEQQEYMEAQEKRNKENLEQLRRKLMQEREQDIKDHDMMLEKQLKDQKAFLEEGFTNKAEEINAEIERLEHNIKDKKENIGPILELIERAFCAWVFSSLILVALLTHNPSLLRK

SEQ ID NO: 870 - protein, 399 aa, mus musculus
KSAELSDQGKATADEEKKTKGRKRKTKSSSRIDEYQQTNLYRVPPNYSPMSSQMTHHPQPALWGYNLVSQPQQPSFFLQNPSLNPGGSRLDPAGSFVPTNTKQALSNMLQRRSGAMLQPPSLHAVTSQQQLLQMKLLQQQQQQQQQQQQQQRLLRQAQTRPFQQGQPGDQAALFTAQARPSPQLPQYPGLQQAQTMPQGYTMYGTQMPLQQAAQQQPGGVVLSPSYNSRAYPAAHSSPALMERLRQLQQQPSGYVQQQASPYLQPVAGSQRLNHQALQQSPLVGGGIDAVLTPAHPNLPSVPLPQDPMRPRQQQVRQQQRLLQMQQPQQAPQPQQPSQTQSQALGLQAMQPQQPLFPRQGLQQTQQQQQTAALVRQLQKQLSSNQPQQGVTPCAHPSHF

SEQ ID NO: 871 - protein, 1251 aa, mus musculus
GLRKVSFQHPRVPKEGTHQCRLWTSQERLTDLCALWQPGVFLPSADGSRASAGVGKSRPNEAEKLSTVWKAHIERHKASGARGLGSGEQGLVLRMARQQAPPWVHIALILFLLSLGGAIEIPMDLTQPPTITKQSVKDHIVDPRDNILIECEAKGNPAPSFHWTRNSRFFNIAKDPRVSMRRRSGTLVIDFRSGGRPEEYEGEYQCFARNKFGTALSNRIRLQVSKSPLWPKENLDPVVVQEGAPLTLQCNPPPGLPSPVIFWMSSSMEPITQDKRVSQGHNGDLYFSNVMLQDMQTDYSCNARFHFTHTIQQKNPFTLKVLTTRGVAERTPSFMYPQGTSSSQMVLRGMDLLLECIASGVPTPDIAWYKKGGDLPSNKAKFENFNKALRITNVSEEDSGEYFCLASNKMGSIRHTISVRVKAAPYWLDEPKNLILAPGEDGRLVCRANGNPKPTVQWMVNGEPLQSAPPNPNREVAGDTIIFRDTQISSRAVYQCNTSNEHGYLLANAFVSVLDVPPRMLSARNQLIRVILYNRTRLDCPFFGSPIPTLRWFKNGQGSNLDGGNYHVYENGSLEIKMIRKEDQGIYTCVATNILGKAENQVRLEVKDPTRIYRMPEDQVAKRGTTVQLECRVKHDPSLKLTVSWLKDDEPLYIGNRMKKEDDSLTIFGVAERDQGSYTCMASTELDQDLAKAYLTVLGRPDRPRDLELTDLAERSVRLTWIPGDDNNSPITDYVVQFEEDQFQPGVWHDHSRFPGSVNSAVLHLSPYVNYQFRVIAVNEVGSSHPSLPSERYRTSGAPPESNPSDVKGEGTRKNNMEITWTPMNATSAFGPNLRYIVKWRRRETRETWNNVTVWGSRYVVGQTPVYVPYEIRVQAENDFGKGPEPDTIIGYSGEDYPRAAPTEVKIRVLNSTAISLQWNRVYSDTVQGQLREYRAYYWRESSLLKNLWVSQKRQQASFPGDRPRGVVARLFPYSNYKLEMVVVNGRGDGPRSETKEFTTPEGVPSAPRRFRVRQPNLETINLEWDHPEHPNGILIGYILRYVPFNGTKLGKQMVENFSPNQTKFSVQRADPVSRYRFSLSARTQVGSGEAATEESPAPPNEATPTAAYTNNQADIATQGWFIGLMCAIALLVLILLIVCFIKRSRGGKYPVREKKDVPLGPEDPKEEDGSFDYSDEDNKPLQGSQTSLDGTIKQQESDDSLVDYGEGGEGQFNEDGSFIGQYTVKKDKEETEGNESSEATSPVNAIYSLA

SEQ ID NO: 872 - protein, 792 aa, mus musculus
HRRLRVRAAAAAAVSAAAGEGPSTMSNLSKGTGSRKDTKMRIRAFPMTMDEKYVNSIWDLLKNAIQEIQRKNNSGLSFEELYRNAYTMVLHKHGEKLYTGLREVVTEHLINKVREDVLNSLNNNFLQTLNQAWNDHQTAMVMIRDILMYMDRVYVQQNNVENVYNLGLIIFRDQVVRYGCIRDHLRQTLLDMIARERKGEVVDRGAIRNACQMLMILGLEGRSVYEEDFEAPFLEMSAEFFQMESQKFLAENSASVYIKKVEARINEEIERVMHCLDKSTEEPIVKVVERELISKHMKTIVEMENSGLVHMLKNGKTEDLACMYKLFSRVPNGLKTMCECMSCYLREQGKALVSEEGEGKNPVDYIQGLLDLKSRFDRFLQESFNNDRLFKQTIAGDFEYFLNLNSRSPEYLSLFIDDKLKKGVKGLTEQEVETILDKAMVLFRFMQEKDVFERYYKQHLARRLLTNKSVSDDSEKNMISKLKTECGCQFTSKLEGMFRDMSISNTTMDEFRQHLQATGVSLGGVDLTVRVLTTGYWPTQSATPKCNIPPAPRHAFEIFRRFYLAKHSGRQLTLQHHMGSADLNATFYGPVKKEDGSEVGVGGAQVTGSNTRKHILQVSTFQMTILMLFNNREKYTFEEIQQETDIPERELVRALQSLACGKPTQRVLTKEPKSKEIESGHIFTVNDQFTSKLHRVKIQTVAAKQGESDPERKETRQKVDDDRKHEIEAAIVRIMKSRKKMQHNVLVAEVTQQLKARFLPSPVVIKKRIEGLIEREYLARTPEDRKVYTYVA

SEQ ID NO: 873 - protein, 961 aa, mus musculus
RLNEILYPPLKQEQVQVLIEKYEPNSSLAKKGQMSVDGFMRYLSGEENGVVSPEKLDLNEDMSQPLSHYFINSSHNTYLTAGQLAGNSSVEMYRQVLLSGCRCVELDCWKGRTAEEEPVITHGFTMTTEISFKEVIEAIAECAFKTSPFPILLSFENHVDSPKQQAKMAEYCRLIFGDALLMEPLEKYPLESGVPLPSPMDLMYKILVKNKKKSHKSSEGSGKKKLSEQASNTYSDSSSVFEPSSPGAGEADTESDDDDDDDDCKKSSMDEGTAGSEAMATEEMSNLVNYIQPVKFESFEISKKRNKSFEMSSFVETKGLEQLTKSPVEFVEYNKMQLSRIYPKGTRVDSSNYMPQLFWNAGCQMVALNFQTVDLAMQINMGMYEYNGKSGYRLKPEFMRRPDKHFDPFTEGIVDGIVANTLSVKIISGQFLSDKKVGTYVEVDMFGLPVDTRRKAFKTKTSQGNAVNPVWEEEPIVFKKVVLPSLACLRIAAYEEGGKFIGHRILPVQAIRPGYHYICLRNERNQPLTLPAVFVYIEVKDYVPDTYADVIEALSNPIRYVNLMEQRAKQLAALTLEDEEEVKKEADPGETSSEAPSETRTTPAENGVNHTASLAPKPPSQAPHSQPAPGSVKAPAKTEDLIQSVLTEVEAQTIEELKQQKSFVKLQKKHYKEMKDLVKRHHKKTTELIKEHTTKYNEIQNDYLRRRAALEKSAKKDSKKKSEPSSPDHGSSAIEQDLAALDAEMTQKLIDLKDKQQQQLLNLRQEQYYSEKYQKREHIKLLIQKLTDVAEECQNNQLKKLKEICEKEKKELKKKMDKKRQEKITEAKSKDKSQMEEEKTEMIRSYIQEVVQYIKRLEEAQSKRQEKLVEKHNEIRQQILDEKPKQLQTELEQEYQDKFKRLPLEILEFVQEAMKGKISEDSNHGSAPPSLASDAAKVNLKSPSSEEIERENPGREFDTPL

SEQ ID NO: 874 - protein, 640 aa, mus musculus
EPLVPAEYLFIQTFWQTMNREWQGIDKLQLDKYYMLIRLVLRQSFEVLKRNAWEESQITLFLDILMKEILSPESQSPNGVRTHLIDVYLEELTTVGGAELLADQNLKLIDPFCRIAAKTKDHTLVQTVARGVFEVIVDQSACVPEESVEERKTKEDGSGFPTKALACRKAVSGKKAALDECLRDGVIGSRERDICAALKDSGSPLQFDYKAVADRLLEIANSKSTPPFNRKRLCRLVRKFQDLCEGNGAPLSSAEDNGQRRHKRKRKKLLESEKGDTVSPAAEEDSGGHIHKKKRKKRKRSHFQPDTQNLDAVAVPKVPDSESEPDTAQRQAPCGQACVTEPTAEAVSSIGENSSKPTPVMPIHNKRKRPRKKKLRAHKEICKSTTLPQEDMSKNDAVSGHSQSSAAHISSSEGVQAQKRKRKLGALPDSSSDLPVQKSGTPTSPVEGKDGQTTLPRCKRSQKKTASSTLDPCDPSSQKPAISKKKKKTMKLMSNGVLESNPGQIQALGSNRTLKKPLKTEDDFVKFDTRFLPKPLFFRKAKNSSATRPQGPAGQLNKTPSSSKKVTFGLNRNMTAEFKKTDKSILVSPTGLSRVAFNPEQRPLHGVLKTATSSPASTPLSPMRLPATTPKRRPRAADFF

SEQ ID NO: 875 - protein, 495 aa, mus musculus
MATTATCTRFTDDYQLFEELGKGAFSVVRRCVKKTSTQEYAAKIINTKKLSARDHQKLEREARICRLLKHPNIVRLHDSISEEGFHYLVFDLVTGGELFEDIVAREYYSEADASHCIHQILESVNHIHQHDIVHRDLKPENLLLASKCKGAAVKLADFGLAIEVQGEQQAWFGFAGTPGYLSPEVLRKDPYGKPVDIWACGVILYILLVGYPPFWDEDQHKLYQQIKAGAYDFPSPEWDTVTPEAKNLINQMLTINPAKRITADQALKHPWVCQRSTVASMMHRQETVECLRKFNARRKLKGAILTTMLVSRNFSAAKSLLNKKSDGGVKEPQTTVVHNATDGIKGSTESCNTTTEDEDLKVRKQEIIKITEQLIEAINNGDFEAYTKICDPGLTSFEPEALGNLVEGMDFHKFYFENLLSKNSKPIHTTILNPHVHVIGEDAACIAYIRLTQYIDGQGRPRTSQSEETRVWHRRDGKWLNVHYHCSGAPAAPLQ

SEQ ID NO: 876 - protein, 589 aa, mus musculus
MAAADGDDSLYPIAVLIDELRNEDVQLRLNSIKKLSTIALALGVERTRSELLPFLTDTIYDEDEVLLALAEQLGTFTTLVGGPEYVHCLLPPLESLATVEETVVRDKAVESLRAISHEHSPSDLEAHFVPLVKRLAGGDWFTSRTSACGLFSVCYPRVSSAVKAELRQYFQNLCSDDTPMARRAAASKLGEFAKVLELDNVKSEIIPMFSNLASDEQDSVRLLAVEACVNIAQLLPQEDLEALVMPTLRQAAEDKSWRVRYMVADKFTELQKAVGPEITKTDLVPAFQNLMKDCEAEVRAAASHKVKEFCENLSADCRENVIMTQILPCIKELVSDANQHVKSALASVIMGLSPILGKDNTIEHLLPLFLAQLKDECPEVRLNIISNLDCVNEVIGIRQLSQSLLPAIVELAEDAKWRVRLAIIEYMPLLAGQLGVEFFDEKLNSLCMAWLVDHVYAIREAATSNLKKLVEKFGKEWAHATIIPKVLAMSGDPNYLHRMTTLFCINVLSEVCGQDITTKHMLPTVLRMAGDPVANARFNVARSLQKIGPILDNSTLQSEVKPILEKLTQDQDVDVKYFAQEALTVLSLA

SEQ ID NO: 877 - protein, 309 aa, mus musculus
MAPRNSSSVTEFILVGFSNQPALQLPLFFVFLGIYVLTVIGNLGLITLIGLNSSLHTPMYFFLFNLSFIDFCYSCVFTPKMLSDFVSENIISYMGCMTQLFFFCFFVNSECYVLVSMAYDRYVAICNPLLYTVTMSPQVCTLLMFCSYVIGFAGAMAHTGSMLTLTFCDSNMIHHYLCEVLPLLQLSCTSTYANELVFFIVVGVVITASSISIFISYALILSNILKIPSAEGRSKAFGTCGSHVVAVALFFGSGAFTYLTTSFPGSMEEGRFASVFYTNVVPMLNPLIYSLRNKDVKLALNKTLKRVLF

SEQ ID NO: 878 - protein, 1999 aa, mus musculus
VVLAPVQLGKWLVLFCDEINLPDMDKYGTQRVISFIRQMVEHGGFYRTSDQTWVKLERIQFVGACNPPTDPGRKPLSHRFLRHVPVVYVDYPGPASLTQIYGTFNRAMLRLIPSLRTYAEPLTAAMVEFYTMSQERFTQDTQPHYIYSPREMTRWVRGIFEALRPLETLPVEGLIRIWAHEALRLFQDRLVEDEERRWTDENIDMVALKHFPNIDKEKAMSRPILYSNWLSKDYIPVDQEELRDYVKARLKVFYEEELDVPLVLFNEVLDHVLRIDRIFRQPQGHLLLIGVSGAGKTTLSRFVAWMNGLSVYQIKVHRKYTGEDFDEDLRTVLRRSGCKNEKIAFIMDESNVLDSGFLERMNTLLANGEVPGLFEGDEYATLMTQCKEGAQKEGLMLDSHEELYKWFTSQVIRNLHVVFTMNPSSEGLKDRAATSPALFNRCVLNWFGDWSTEALYQVGKEFTSKMDLEKPNYIVPDYMPVVYDKLPQPPTHREAIVNSCVFVHQTLHQANARLAKRGGRTMAITPRHYLDFINHYANLFHEKRSELEEQQMHLNVGLRKIKETVDQVEELRRDLRIKSQELEVKNAAANDKLKKMVKDQQEAEKKKVMSQEIQEQLHKQQEVIADKQMSVKEDLDKVEPAVIEAQNAVKSIKKQHLVEVRSMANPPAAVKLALESICLLLGESTTDWKQIRSIIMRENFIPTIVNFSAEEISDAIREKMKKNYMSNPSYNYEIVNRASLACGPMVKWAIAQLNYADMLKRVEPLRNELQKLEDDAKDNQQKANEVEQMIRDLEASIARYKEEYAVLISEAQAIKADLAAVEAKVNRSTALLKSLSAERERWEKTSETFKNQMSTIAGDCLLSAAFIAYAGYFDQQMRQNLFTTWSHHLQQANIQFRTDIARTEYLSNADERLRWQASSLPADDLCTENAIMLKRFNRYPLIIDPSGQATEFIMNEYKDRKITRTSFLDDAFRKNLESALRFGNPLLVQDVESYDPVLNPVLNREVRRTGGRVLITLGDQDIDLSPSFVIFLSTRDPTVEFPPDLCSRVTFVNFTVTRSSLQSQCLNEVLKAERPDVDEKRSDLLKLQGEFQLRLRQLEKSLLQALNEVKGRILDDDTIITTLENLKREAAEVTRKVEETDIVMQEVETVSQQYLPLSTACSSIYFTMESLKQVHFLYQYSLQFFLDIYHNVLYENPNLKGATDHTQRLSIITKDLFQVAFNRVARGMLHQDHITFAMLLARIKLKGTVGEPTYDAEFQHFLRGKEIVLSAGSTPKIQGLTVEQAEAVVRLSCLPAFKDLIAKVQADEQFGIWLDSSSPEQTVPYLWSEETPTTPIGQAIHRLLLIQAFRPDRLLAMAHMFVSTNLGESFMSIMEQPLDLTHIVGTEVKPNTPVLMCSVPGYDASGHVEDLAAEQNTQITSIAIGSAEGFNQADKAINTAVKSGRWVMLKNVHLAPGWLMQLEKKLHSLQPHACFRLFLTMEINPKVPVNLLRAGRIFVFEPPPGVKANMLRTFSSIPVSRICKSPNERARLYFLLAWFHAIIQERLRYAPLGWSKKYEFGESDLRSACDTVDTWLDDTAKGRQNISPDKIPWSALKTLMAQSIYGGRVDNEFDQRLLNTFLERLFTTRSFDSEFKLACKVDGHKDIQMPDGIRREEFVQWVELLPDAQTPSWLGLPNNAERVLLTTQGVDMISKMLKMQMLEDEDDLAYAETEKKARTDSTSDGRPAWMRTLHTTASNWLHLIPQTLSPLKRTVENIKDPLFRFFEREVKMGAKLLQDVRQDLADVVQVCEGKKKQTNYLRTLINELVKGILPRSWSHYTVPAGMTVIQWVSDFSERIKQLQNISQAAASGGAKELKNIHVCLGGLFVPEAYITATRQYVAQANSWSLEELCLEVNVTASQSATLDACSFGVTGLKLQGATCSNNKLSLSNAISTVLPLTQLRWVKQTSAEKKASVVTLPVYLNFTRADLIFTVDFEIATKEDPRSFYERGVAVLCTE

SEQ ID NO: 879 - protein, 175 aa, mus musculus
DTAAAGQGERNHLITKRDLTLREGDVHTLGCGIAKCLQITCQVGRLDRGKSAILYVKSLLWTETFMNKENQNHSYSLKSSASFNIIEFPYKNLPIEDLFNSTLVTTNITWGIQPAPMPVPVWVIILAVLAGLLLLAVLVFVMYRMGFFKRVRPPQEEQEREQLQPHENGEGNSET

SEQ ID NO: 880 - protein, 345 aa, mus musculus
TPPWQSQQPHHAALIPSPLIPRPSDRCRQRRRNTTSADHSTRENRHQHPGCQNDKFGNCHGRCNYSAIFCGKAVCYWNFAEVIQTEKYDVQYTYLGGQVCVSAHLRSQTGTRDDTYVHDGTVCGSGQVCFRGDCLRVHVLRGTRECEADDKCQGHGICNNLNNCQCESGFAPPECDMTPSSPGGSMDDGFWLPFDKSTPLIFKRHGLKYKKVLLISFYILLPFLVVLAFMAVKRMIGKRLAKQNISKALEHKEEAFNRGSMNPGVVSGGNTDQNLMTVPGSFNSYAYHGNTDQNFMTVPGSFNSYSYHGNTDQNFMTVPGSFNSYSYQDVPYYRSIPEDGNDSQQ

SEQ ID NO: 881 - protein, 538 aa, mus musculus
MTQRSSVTIKSGGTRNFSASSASLLPGCRPGFSSVSVSQSGKSFGGGIGGGFGTRSLHSFGGNKRISIGGGYRSTRASFGGAACGLGVSGIGYRVGGAYGGYGYGGGMAPGAGGIHEVTVNQSLLTPLHLEIDPSLQRVRKEEKEQIKTLNNKFASFIDKVRFLEQQNKVLETKWSLLQEHKTTRTNLEPMFEAYITNLRRQLECLGGERSRLETELKSMQDVVEDFKNKYEEEIHRRTAAENEFVVLKKDVDAAYMNKVELEAKVEALMDEINFLRAFFEAELAQLQAQISETSVVLSMDNNRSLNLDSIIAEVKAQYEDIANRSRAEAESWYQTKYEELQRSAGQRGDDLRTTKMEISELNRAMQRLRSEIDNLKKQCATLQASIADAEQRGELALKDAKNKLAELEDALQKAKQDMARQLREYQELMNVKLALDIEIATYRKLLEGEECRLTGEGVGAVNISVVSSSGGTGYSGGGGLCVSGGVYSGGGYSGSGLCYGGGGSGGFSSTSGRSVSGSSSSMRIVSKTSSTKKSYRS

SEQ ID NO: 882 - protein, 296 aa, mus musculus
MRTRRTLRGHLAKIYAMHWATDSKLLVSASQDGKLIVWDTYTTNKVHAIPLRSSWVMTCAYAPSGNFVACGGLDNMCSIYNLKSREGNVKVSRELSAHTGYLSCCRFLDDNNIVTSSGDTTCALWDIETGQQKTVFVGHTGDCMSLAVSPDYKLFISGACDASAKLWDVREGTCRQTFTGHESDINAICFFPNGEAICTGSDDASCRLFDLRADQELTAYSQESIICGITSVAFSLSGRLLFAGYDDFNCNVWDSLKCERVGILSGHDNRVSCLGVTADGMAVATGSWDSFLKIWN

SEQ ID NO: 883 - protein, 412 aa, mus musculus
MDPAWDGSQGSRPGTASIRVRELSWQGLNNPHPQNKRLGSHGDIHRERWVEERLSPARLQALAQVDDLQLVRVLEMCVDTRKNSLGNFGLYLPNLIQLKLNHSYLGSLRDLGTSLGHLQVLWLARCGLTDLDGIGSFLELKELYVSYNNISDLSPLCLLEQLEVLDLEGNNVEDLGQMRYLQLCPRLAMLTLEGNLVCLKPDPGPSNKAPQGYNYRAEVKKLIPQLHVLDEVPTTCTSAPAPQTLSQDWLMVKEAIKEGSVLDILLPRLDDPHGATIRKFDPTLPVPETQPWALSLLVPGGPLPEGLLSENPATEDHASNLTHGPGQVLCGNPTKGLRKRRNQYQSSSPKTAGVPAGKICSGPSPGPTEGSCRTGRPDWTQDFPNPATPGLRTFQDIRLSFDPFSPKVPNAT

SEQ ID NO: 884 - protein, 203 aa, mus musculus
MSCHDWACILDDCSGNSELNYSGALLFQHYPGHSVAWPAGQPLGFLLSVRSFHRALLPLCVLHSFYDATEHGSIRHAICHPPPTSPGDSKETGMVFGILRCSLGFHAEAIVQGTLGLNCCELLKLVMPWAGINGLRRLTWVHWTLIITFSIVKCFQNSKIKLKIKFCDALTFSQITYSISTVVNIDCFLYLSENRHTHLHSYS

SEQ ID NO: 885 - protein, 142 aa, mus musculus
MVLSGEDKSNIKAAWGKIGGHGAEYGAEALERMFASFPTTKTYFPHFDVSHGSAQVKGHGKKVADALANAAGHLDDLPGALSALSDLHAHKLRVDPVNFKLLSHCLLVTLARHHPADFTPAVHASLDKFLASVSTVLTSKYR

SEQ ID NO: 886 - protein, 497 aa, mus musculus
AARLQAAYAGDKADDIQKRENEVLEAWKSLLDACEGRRVRLVDTGDKFRFFSMVRDLMLWMEDVIRQIEAQEKPRDVSSVELLMNNHQGIKAEIDARNDSFTACIELGKSLLARKHYASEEIKEKLLQLTEKRKEMIDKWEDRWEWLRLILEVHQFSRDASVAEAWLLGQEPYLSSREIGQSVDEVEKLIKRHEAFEKSAATWDERFSALERLTTLELLEVRRQQEEEERKRRPPSPDPNTKVSEEAESQQWDTSKGDQVSQNGLPAEQGSPRMAGTMETSEMVNGAAEQRTSSKESSPVPSPTLDRKAKSALPAQSAATLPARTLETPAAQMEGFLNRKHEWEAHNKKASSRSWHNVYCVINNQEMGFYKDAKSAASGIPYHSEVPVSLKEAICEVALDYKKKKHVFKLRLSDGNEYLFQAKDDEEMNTWIQAISSAISSDKHDTSASTQSTPASSRAQTLPTSVVTITSESSPGKREKDKEKDKEKRFSLFGKKK

SEQ ID NO: 887 - protein, 224 aa, mus musculus
VTVAMVCTRKISIAKSVFYIIAQCLGAIIGAGILYLVTPPSVVGGLGVTTVHGNLTAGHGLLVELIITFQLVFTIFASCDSKRTDVTGSIALAIGFSVAIGHLFAINYTGASMNPARSFGPAVIMGNWANHWIYWVGPIMGAVLAGALYEYVFCPDVELKRRLKEAFSKAAQQTKGSYMEVEDNRSQVETEDLILKPGVVHVIDIDRGEEKKGKDSSGEVLSSV

SEQ ID NO: 888 - protein, 302 aa, mus musculus
MADTATTASAASAAASAPNASTDAPPFQLGKPRFQQTSFYGRFRHFLDIIDPRTLFVTEKRLREAVQLLEDYKHGTLRPGVTNEQLWSAQKIKQAILHPDTNEKIFMPFRMSGYIPFGTPIVVGLLLPNQTLASTVFWQWLNQSHNACVNYANRNATKPSPASKFIQGYLGAVISAVSIAVGLNVLVQKANKFTPATRLLVQRFVPFPAVASANICNVVLMRYGELEEGIDVLDADGNLVGSSKIAARHALLETALTRVVLPMPILVLPPIVMSMLEKQLAGAQCCRVTHGKAWLCPGGGTG

SEQ ID NO: 889 - protein, 451 aa, mus musculus
MAVAQADPGSDPAGGARFFCTAGRGLEPFLMREVRARLEATQVEYISGKVFFTTCSDLPSMKKLKSAERLFVLIKKQLPIAVSSLHKGKILNEMQRFVNDDPGSWLEAISLWKKLLEHDPKREKVSQRDANPLKRKAGENETIIAKKLKVEEKQEVAKDHGESQEDKLLQGSPEQGEAVTRTELQDHRLNSTTEKAADAQDQEDLTFRVSCRCTGNVRKVITGQEAGRVIGLALMRQFGWKADLRNPNIEIFMHLSDAYSVVGIPLLRMPLASRTYIQTAGLRSTIAWAMASIAEIKAGALVLDPMCGLGTILVEAAEEWPDVFYMGADMSDAQLLGACDNLKAAGLTDRIELLKSSVTDLPLPSQSTDVIISDIPFGKKFKLGKDIKSILQEMERHVYTSWELGLQTAPVAVEVSVGVTLMNLPACLPAACLPACCLPAACLLPACCLPA

SEQ ID NO: 890 - protein, 148 aa, mus musculus
MSQGDSNPAAIPHAAEDIQGDDRWMSQHNRFVLDCKDKEPDVLFVGDSMVQLMQQYEIWRELFSPLHALNFGIGGDTTRHVLWRLKNGELENIKPKVIVVWVGTNTHENTAEEVAGGIEAIVQLINTRRPHAKIIVLGLLPRGETPTL

SEQ ID NO: 891 - protein, 446 aa, mus musculus
MEEDIDTRKINNSFLRDHSYATEADIISTVEFNHTGELLATGDKGGRVVIFQREQESKNQVHRRGEYNVYSTFQSHEPEFDYLKSLEIEEKINKIRWLPQQNAAYFLLSTNDKTVKLWKVSERDKRPEGYNLKDEEGRLRDPATITTLRVPVLRPMDLMVEATPRRVFANAHTYHINSISVNSDYETYMSADDLRINLWNFEITNQSFNIVDIKPANMEELTEVITAAEFHPHHCNTFVYSSSKGTIRLCDMRASALCDRHTKFFEEPEDPSNRSFFSEIISSISDVKFSHSGRYIMTRDYLTVKVWDLNMENRPIETYQVHDYLRSKLCSLYENDCIFDKFECVWNGSDRQGLITSHVTAVGDKVAWNAKMSAFIGDWTDVPEIACPPQKKKVYFQETLTFLSTEIMPPLQGWNSISASLLPAPRGLNHSITLMCPRRDSGDPPA

SEQ ID NO: 892 - protein, 298 aa, mus musculus
MGDKALSFLKDFLAGGIAAAVSKTAVAPIERVKLLLQVQHASKQISAEKQYKGIIDCVVRIPKEQGFLSFWRGNLANVIRYFPTQALNFAFKDKYKQIFLGGVDRHKQFWRYFAGNLASGGAAGATSLCFVYPLDFARTRLAADVGKGSSQREFNGLGDCLTKIFKSDGLKGLYQGFSVSVQGIIIYRAAYFGVYDTAKGMLPDPKNVHIIVSWMIAQSVTAVAGLVSYPFDTVRRRMMMQSGRKGADIMYTGTLDCWRKIAKDEGANAFFKGAWSNVLRGMGGAFVLVLYDEIKKYV

SEQ ID NO: 893 - protein, 323 aa, mus musculus
MAEGERQPPPDSSEETPPTTQNFIIPKKEIHTIQDMGKWKRSQAYADYIGFILTLNEGVKGKKLTFDYKVSEAIEKLVALLDTLDRWIDETPPVDQPSRFGNKAYRTWYAKLDQEAENLVATVVPTHLAAAVPEVAVYLKEAVGNSTRIDYGTGHEAAFAAFLCCLCKIGVLRVDDQVAIVFKVFDRYLEVMRKLQKTYRMEPAGSQGVWGLDDFQFLPFIWGSSQLIDHPHLEPRHFVDEKAVSENHKDYMFLQCILFITEMKTGPFAEHSNQLWNISAVPSWSKVNQGLIRMYKAECLEKFPVIQHFKFGSLLPIHPVTSG

SEQ ID NO: 894 - protein, 858 aa, mus musculus
MVNFTVDQIRAIMDKKANIRNMSVIAHVDHGKSTLTDSLVCKAGIIASARAGETRFTDTRKDEQERCITIKSTAISLFYELSENDLNFIKQSKDGSGFLINLIDSPGHVDFSSEVTAALRVTDGALVVVDCVSGVCVQTGTVLRQAIAERIKPVLMMNKMDRALLELQLEPEEIYQTFQRIVENVNVIISTYGEGESGPMGNIMIDPVLGTVGFGSGLHGWAFTLKQFAEMYVAKFAAKGEGQLSAAERAKKVEDMMKKLWGDRYFDPANGKFSKSANSPDGKKLPRTFCQLILDPIFKVFDAIMNFRKEETAKLIEKLDIKLDSEDKDKEGKPLLKAVMRRWLPAGDALLQMITIHLPSPVTAQKYRCELLYEGPPDDEAAMGIKSCDPKGPLMMYISKMVPTSDKGRFYAFGRVFSGVVSTGLKVRIMGPNYTPGKKEDLYLKPIQRTILMMGRYVEPIEDVPCGNIVGLVGVDQFLVKTGTITTFEHAHNMRVMKFSVSPVVRVAVEAKNPADLPKLVEGLKRLAKSDPMVQCIIEESGEHIIAGAGELHLEICLKDLEEDHACIPIKKSDPVVSYRETVSEESNVLCLSKSPNKHNRLYMKARPFPDGLAEDIDKGEVSARQELKARARYLAEKYEWDVAEARKIWCFGPDGTGPNILTDITKGVQYLNEIKDSVVAGFQWATKEGALCEENMRGVRFDVHDVTLHADAIHRGGGQIIPTARRCLYASVLTAQPRLMEPIYLVEIQCPEQVVGGIYGVLNRKRGHVFEESQVAGTPMFVVKAYLPVNESFGFTADLRSNTGGQAFPQCVFDHWQILPGDPFDNSSRPCQVVAETRKRKGLKEGIPALDNFLDKL

SEQ ID NO: 895 - protein, 208 aa, mus musculus
MGTGKVVDRKVELEKEDGHELHKRLSQVDPEMAAKLHPHDKRKVARSLQVFEETGISHSEFLHRQHAEDGGGPLGGPLRFPNPCILWLHADQAVLDERLDKRVDDMLAAGLLEELRGFHRRYNLKNISENSQDYQHGIFQSIGFKEFHEYLTTEGKCTPETSNQLLKKGIEALKQVTKRYARKQNRWVKNRFLSRSQTYSHASEDGIQ

SEQ ID NO: 896 - protein, 472 aa, mus musculus
MMLGAEGGEGFVVKVRGLPWSCSADEVQRFFSDCKIQNGAQGIRFIYTREGRPSGEAFVELESEDEVKLALKKDRETMGHRYVEVFKSNNVEMDWVLKHTGPNSPDTANDGFVRLRGLPFGCSKEEIVQFFSGLEIVPNGITLPVDFQGRSTGEAFVQFASQEIAEKALKKHKERIGHRYIEIFKSSRAEVRTHYDPPRKLMAMQRPGPYDRPGAGRGYNSIGRGAGFERMRRGAYGGGYGGYDDYNGYNDGYGFGSDRFGRDLNYCFSGMSDHRYGDGGSTFQSTTGHCVHMRGLPYRATENDIYNFFSPLNPVRVHIEIGPDGRVTGEADVEFATHEDAVAAMSKDKANMQHRYVELFLNSTAGASGGAYEHRYVELFLNSTAGASGGAYGSQMMGGMGLSNQSSYGGPASQQLSGGYGGGYGGQSSMSGYGSQGAVNSSYYSNGSRASMGVNGMGGMSSMSSMSGGWGM

SEQ ID NO: 897 - protein, 120 aa, mus musculus
MCIYCLGLMCLRELEYNMRSSLSGSLFTLRFTVMIVFQDVNIGLSPQLSVKLDAVLCVNNPSTREVEAEGSEVGSILSQVFEVLSQKQQKNKPNQNVEVIILMLMEKTGSGFPCPSRIGI

SEQ ID NO: 898 - protein, 106 aa, mus musculus
MNTLCSIPVSLLTLVAGQNWIYHIRKKRMSAAKVQNQNLSGMEWKASRRGKCWRTDTGLRKATLVFTLVILGTYVSDSLLLVLRLGTGRACWSRTTEPPPSHRFCF

SEQ ID NO: 899 - protein, 321 aa, mus musculus
  misc_feature (136)..(136): Xaa can be any naturally occurring amino acid
MADRDSGSEQGGAALGSGGSLGHPGSGSGSGGGGGGGGGGCGSGGCGGAPGGLQHETQELASKRVDIQNKRFYLDVKHNAKGLFLKIAEVGAGGNKSRLTLSMSVAVEFRDYLGDFIEHYAQLGPSQPPDLAQAQXEPRRALKSEFLVRENRKYYMNLKENQRGRFLRIRQTVNRGPGLGSTQGQTIALPAQGLIEFRDALAKLIDDYGVEEEPAELPEGTSLTVDNKRFFFDVGSNKYGVFMRVSEVKPTYRNSITVPYKVWAKFGHTFCKYSEEMKKIQEKQREKRADCEQLHQQQQQQQEETTAATLLLQGEEEGEKD

SEQ ID NO: 900 - protein, 110 aa, mus musculus
GRRPLSPSTAPLGEFRSIGGSGALAGGERRTVRGRGSGTPRLPRAPPAPQCPRGPVAPASRILPRRLCGRGDRRGLGAGSRAQHCHYLTQQEQCWGELAACRDARCDRLF

SEQ ID NO: 901 - protein, 282 aa, mus musculus
MWACGVILYILLVGYPPFWDEDQHRLYQQIKAGAYDFPSPEWDTVTPEAKDLINKMLTINPAKRITASEALKHPWICQRSTVASMMHRQETVDCLKKFNARRKLKGAILTTMLATRNFSAAKSLLKKPDGVKESTESSNTTIEDEDVKARKQEIIKVTEQLIEAINNGDFEAYTKICDPGLTAFEPEALGNLVEGMDFHRFYFENALSKSNKPIHTIILNPHVHLVGDDAACIAYIRLTQYMDGSGMPKTMQSEETRVWHRRDGKWQNVHFHRSGSPTVPIN

SEQ ID NO: 902 - protein, 160 aa, mus musculus
MKKTQVSRARPGGARKLSKKIAPGAPGSPARSGTGNQAMWGCALPTWIITCIYLQLLLFNPLVKTKEICGNPVTDNVKDITKLVANLPNDYMITLNYVAGMDVLPSHCWLRDMVIQLSLSLTTLLDKFSNISEGLSNYSIIDKLGKIVDDLVLCMEENAP

SEQ ID NO: 903 - protein, 129 aa, mus musculus
  misc_feature (80)..(80): Xaa can be any naturally occurring amino acid
MCALNPIFILFFPIPIIKCPDNSKLREKGLTSLLVAEGYSLPCSRRGRGLGSRSRKLVGWSHCIHSWESGSKQQVETCLXASSPTKLSSSSRKAHSKRFPSMSWNKCQHVSQCGPLPIPTASSSHSGAR

SEQ ID NO: 904 - protein, 227 aa, mus musculus
GPALPKFLELGTCLMAEGSRTQAPGQGPPVNIQFLRAQYEGLRKQQRTQAHLMVFPKEGTMPTPAESMTSAVWINKERRSSLSPEETDSEAEGMLEEGDRSCHQASETPWHTYLELHRLVQTFHLEAGHQGNPKGYLVEPEPRFSPEGDTDVLKNNQKTQQEVKIPEVAQCQSQEGCAPLQVAGSRAQYLSSTKHLRSGKPAYYPFPQRKPPRISQAARNLGLYGPP

SEQ ID NO: 905 - protein, 361 aa, mus musculus
MASTTTCTRFTDEYQLFEELGKGAFSVVRRCMKIPTGQEYAAKIINTKKLSARDHQKLEREARICRLLKHPNIVRLHDSISEEGFHYLVFDLVTGGELFEDIVAREYYSEADASHCIQQILESVNHCHLNGIVHRDLKPENLLLASKSKGAAVKLADFGLAIEVQGDQQAWFGFAGTPGYLSPEVLRKDPYGKPVDMWACGVILYILLVGYPPFWDEDQHRLYQQIKAGAYDFPSPEWDTVTPEAKDLINKMLTINPAKRITASEALKHPWICQRSTVASMMHRQETVDCLKKFNARRKLKGAILTTMLATRNFSAAKSLLKKPDGVKESTESSNTTIEDEDVKATVCRACRCMPQCLSTS

SEQ ID NO: 906 - protein, 444 aa, mus musculus
MPILLFLIDTSASMNQRTDLGTSYLDIAKGAVELFLKLRARDPASRGDRYMLVTYDEPPYCIKAGWKENHATFMNELKNLQASGLTTLGQALRSSFDLLNLNRLISGIDNYGQGRNPFFLEPSILITITDGNKLTSTASVQEELHLPLNSPLPGSELTKEPFRWDQRLFALVLRLPGVASTEPEQLGSVPSDESAITQMCEVTGGRSYCVRTQRMLNQCLESLVQKVQSGVVINFEKTGPDPLPVGEDTLMELCRPSNLFAAQPWHSCHKLIYVRPNSKTGVPVGHWPIPESFWPEQNLPSLPPRTSHPVVRFSCVDCEPMVIDKLPFDKYELEPSPLTQYILERKSPHTCWQVFVTSSSKYNELGYPFGYLKASTTLTCVNLFVMPYNYPVLLPLLDDLFKVHKLKPNLKWRQAFDSYLKTLPPYYLIVCIFCVCIYVYVNCN

SEQ ID NO: 907 - protein, 248 aa, mus musculus
MSGPVPSRARVYTDVNTHRPREYWDYESHVVEWGNQDDYQLVRKLGRSKYSEVFEAINITNNEKVVVKILKPVKKKKIKREIKILENLRGGPNIITLADIVKDPVSRTPALVFEHVNNTDFKQLYQTLTDYDIRFYMYEILKALDYCHSMGIMHRDVKPHNVMIDHEHRKLRLIDWGLAEFYHPGQEYNVRVASRYFKGPELLVDYQMYDYSLDMWSLGCMLASMIFRKEPFFHGHDNYDQVMTCFSH

SEQ ID NO: 908 - protein, 313 aa, mus musculus
MRTERNPFHLRSFRPDFVLIRQHAFGMAENEDFRHLVIGMQYAGLPSINSLESIYNFCDKPWVFAQMVAIFKTLGGEKFPLIEQTYYPNHREMLTLPTFPVVVKIGHAHSGMGKVKVENHYDFQDIASVVALTQTYATAEPFIDAKYDIRVQKIGNNYKAYMRTSISGNWKTNTGSAMLEQIAMSDRYKLWVDACSEMFGGLDICAVKAVHGKDGKDYIFEVMDCSMPLIGEHQVEDRQLITDLVISKMNQLLSRTPALSPQRPLTTQQPQSGTLKEPDSSKTPPQRPPPQGCLQYILDCNGIAVGPKQVQAS

SEQ ID NO: 909 - protein, 129 aa, mus musculus
MSGPTKRGGKARAKVKSRSSRAGLQFPVGRVHRLLRQGNYAQRIGAGAPVYLAAVLEYLTAEVLELAGNAARDNKKTRITPRHLQLAIRNDEELNKLLGRVTIAQGGVLPNIQAVLLPKKTESHKSQTK

SEQ ID NO: 910 - protein, 201 aa, mus musculus
MAELQEVQITEEKPLLPGQTPETAKEAELAARILLDQGQTHSVETPYGSVTFTVYGTPKPKRPAIFTYHDVGLNYKSCFQPLFRFGDMQEIIQNFVRVHVDAPGMEEGAPVFPLGYQYPSLDQLADMIPCILQYLNFSTIIGVGVGAGAYILSRYALNHPDTVEGLVLINIDPNAKGWMDWAAHKLTGLTSSIPDMILGHL

SEQ ID NO: 911 - protein, 403 aa, mus musculus
VMSHIQIPAGLTELLQGYTVEVLRQQPPDLVDFAVEYFTRLREARRQESDTFIVSPTTFHTQESSAVPVIEEDGESDSDSEDADLEVPVPSKFTRRVSVCAETFNPDEEEEDNDPRVVHPKTDEQRCRLQEACKDILLFKNLDQEQLSQVLDAMFEKIVKTDEHVIDQGDDGDNFYVIERGTYDILVTKDNQTRSVGQYDNRGSFGELALMYNTPRAATIIATSEGSLWGLDRVTFRRIIVKNNAKKRKMFESFIESVPLFKSLEMSERMKIVDVIGEKIYKDGERIIAQGEKADSFYIIESGEVSILIRSKTKSNKNGGNQEVEIAHCHKGQYFGELALVTNKPRAASAYAVGDVKCLVMDVQAFERLLGPCMDIMKRNISHYEEQLVKMFGSNLDLMDPGQ

SEQ ID NO: 912 - protein, 78 aa, mus musculus
MEPGNHTMVTEFIILGLTENPTLCCIFFVLFLGVYLTTILGNVSIIMLIRRSPQLHTPMYLFLSHLAFVDIGYSSSVT

SEQ ID NO: 913 - protein, 296 aa, mus musculus
LGKIVNTPEVIRVYIGSFWSHPLLIPDNRKLFEAEEQDLFRDIQSLPRNAALRKLNDLIKRARLAKVHAYIISSLKKEMPSVFGKDTKKKELVNNLAEIYGRIEREHQISPGDFPNLKRMQDQLQAQDFSKFQPLKSKLLEVVDDMLAHDIAQLMVLVRQEETQRPVQMVKGGAFEGTLQGPFGHGYGEGAGEGIDDAEWVVARDKPMYDEIFYTLSPVDGKITGANAKKEMVRSKLPNSVLGKIWKLADIDKDGMLDDEEFALANHLIKVKLEGHELPSELPAHLLPPSKRKVSE

SEQ ID NO: 914 - protein, 267 aa, mus musculus
MGCFECCIKCLGGIPYASLIATILLYAGVALFCGCGHEALSGTVNILQTYFELARTAGDTLDVFTMIDIFKYVIYGIAAAFFVYGILLMVEGFFTTGAIKDLYGDFKITTCGRCVSAWFIMLTYLFMLAWLGVTAFTSLPVYMYFNVWTICRNTTLVEGANLCLDLRQFGIVTIGEEKKICTASENFLRMCESTELNMTFHLFIVALAGAGAAVIAMVHYLMVLSANWAYVKDACRMQKYEDIKSKEEQELHDIHSTRSKERLNAYT

SEQ ID NO: 915 - protein, 163 aa, mus musculus
MEALILEPSLYTVKAILILDNDGDRLFAKYYDDTYPSVKEQKAFEKNIFNKTHRTDSEIALLEGLTVVYKSSIDLYFYVIGSSYENELMLMAVLNCLFDSLSQMLRKNVEKRALLENMEGLFLAVDEIVDGGVILESDPQQVVHRVALRGEDVPLTEQTVSQV

SEQ ID NO: 916 - protein, 190 aa, mus musculus
MFHQVWAALLSLYGLLFNSMNQCPEHSQLTALGMDDTETPEPHLGLWYFIAGAAPTTEELATFDPVDNIVFNMAAGSAPRQLQLRATIRTKSGVCVPRKWTYRLTEGKGNMELRTEGRPDMKTDLFSSSCPGGIMLKETGQGYQRFLLYNRSPHPPEKCVEEFKSLTSCLDFKAFLVTPRNQEACPLSSK

SEQ ID NO: 917 - protein, 309 aa, mus musculus
MNSQNQGYWEPPRKRCCCARRGTQLMLVGLLSTAMWAGLLALLLLWHWETEKNLKQLGDTAIQNVSHVTKDLQKFQSNQLAQKSQDSRLSQNLTGLQEDLRNAQSQNSKLSQNLNRLQDDLVNIKSLGLNEKRTASDSLEKLQEEVAKLWIEILISKGTACNICPKNWLHFQQKCYYFGKGSKQWIQARFACSDLQGRLVSIHSQKEQDFLMQHINKKDSWIGLQDLNMEGEFVWSDGSPVGYSNWNPGEPNNGGQGEDCVMMRGSGQWNDAFCRSYLDAWVCEQLATCEISAPLASVTPTRPTPKSEP

SEQ ID NO: 918 - protein, 129 aa, mus musculus
MAKFIRNFAEKAPSMVAAAVTYSKPRLATFWHYAKVELVPPTPAEIPTAIQSVKKIIQSAKTGSFKHLTVKEAVLNGLVATEVWMWFYIGEIIGKRGIVGYEVEDQSLTSDLSSYLNVLGPCVTGLLSE

SEQ ID NO: 919 - protein, 405 aa, mus musculus
MATPGNLGSSVLASKTKTKKKHFVAQKVKLFRASDPLLSVLMWGVNHSINELSHVQIPVMLMPDDFKAYSKIKVDNHLFNKENMPSHFKFKEYCPMVFRNLRERFGIDDQDFQNSLTRSAPLPNDSQARSGARFHTSYDKRYVIKTITSEDVAEMHNILKKYHQYIVECHGVTLLPQFLGMYRLNVDGVEIYVIVTRNVSSHRLSVYRKYDLKGSTVAREASNKEKAKELPTLKDNDFINEGQKIYIDDNNKKIFLEKLKKDVEFLAQLKLMDYSLLVGIHDVERAEQEEVECEENDGEEEGESDSTHPIGTPPDSPGNTLNSSPPLAPGEFDPNIDVYAIKCHENAPRKEVYFMAIIDILTHYDAKKKAAHAAKTVKHGAGAEISTVNPEQYSKRFLDFIGHIL

SEQ ID NO: 920 - protein, 136 aa, mus musculus
  misc_feature (3)..(3): Xaa can be any naturally occurring amino acid
MRXRGSPRVEAAAAYCRQLCQVSPSPSAGLGGRSAGGPRLCVPRPGWAGRPRGSVHAPGLRRGPRAARRAPVPLSPPAVARSRSAFVVGLGCDRRVFVDVLEPIPPDLQAGSGGGVCAAAVPAGCSPRCIGAVTVP

SEQ ID NO: 921 - protein, 211 aa, mus musculus
  misc_feature (28)..(28): Xaa can be any naturally occurring amino acid
MLQLGLRVLGCKASSVLRASTCLAGRAXRKEASWECGGTRSFSKFRGDHGPRSKVGDAIPSVEVFEGEPEKKVNLAELFKGKKGVLFGVPGAFTPGCYKTHLPGFVEQAGALKAKGAQVVACLSVNDVFVIEEWGRAHQAEGKVRLLADPTGAFGKATDLLLDDSLVSLFGNRRLKRFSMVIDNGIVKALNVEPDGTGLTCSLAPNILFQL

SEQ ID NO: 922 - protein, 248 aa, mus musculus
MERASLIQKAKLAEQAERYEDMAAFMKSAVEKGEELSCEERNLLSVAYKNVVVGQRAAWRVLSSIEQKSNEEGSEEKGPEVKEYREKVETELRGVCDTVLGLLDSHLIKGAGDAESRVFYLKMKGDYYRYLAEVATGDDKKRIIDSARSAYQEAMDISKKEMPPTNPIRPGLALNFSVFHYEIANSPEEAISLAKTTFDEAMADLHTLSEDSYKDSTLIMQLLRDNLTLWTADSAGEEGGDWPEEPQS

SEQ ID NO: 923 - protein, 488 aa, mus musculus
MASLSLAPVNIFKAGADEERAETARLSSFIGAIAIGDLVKSTLGPKGMDKILLSSGRDAALMVTNDGATILKNIGVDNPAAKVLVDMSRVQDDEVGDGTTSVTVLAAELLREAESLIAKKIHPQTIISGWREATKAAREALLSSAVDHGSDEARFWQDLMNIAGTTLSSKLLTHHKDHFTKLAVEAVLRLKGSGNLEAIHVIKKLGGSLADSYLDEGFLLDKKIGVNQPKRIENAKILIANTGMDTDKIKIFGSRVRVDSTAKVAEIEHAEKEKMKEKVERILKHGINCFINRQLIYNYPEQLFGAAGVMAIEHADFAGVERLALVTGGEIASTFDHPELVKLGSCKLIEEVMIGEDKLIHFSGVALGEACTIVLRGATQQILDEAVAMESFAKALRMLPTIIADNAGYDSADLVAQLRAAHSEGHITAGLDMKEGTIGDMAVLGITESFQVKRQVLLSAAEAAEVILRVDNIIKAAPRKRVPDHHPC
